(19) United States
(12) Patent Application Publication
(10) Pub. No.: US 2022/0096606 A1
(43) Pub. Date: Mar. 31, 2022

(54) Compositions and Methods for Treatment of Duchenne Muscular Dystrophy

(71) Applicant: Vertex Pharmaceuticals Incorporated, Boston, MA (US)

(72) Inventors: Jesper Gromada, Boston, MA (US); Tudor Fulga, Boston, MA (US); Alison McVie-Wylie, Boston, MA (US); Giselle Dominguez Gutierrez, Boston, MA (US); Yurong Xin, Boston, MA (US); Fatih Bolukbasi, Arlington, MA (US); Yi-Li Min, Boston, MA (US); Eric Anderson, Cambridge, MA (US)

(73) Assignee: Vertex Pharmaceuticals Incorporated, Boston, MA (US)

(21) Appl. No.: 17/469,665

(22) Filed: Sep. 8, 2021

Related U.S. Application Data
(60) Provisional application No. 63/179,850, filed on Apr. 26, 2021.
(60) Provisional application No. 63/166,174, filed on Mar. 25, 2021.
(60) Provisional application No. 63/152,114, filed on Feb. 22, 2021.
(60) Provisional application No. 63/076,250, filed on Sep. 9, 2020.

(51) Int. Cl. A61K 38/46; A61K 31/7105; A61K 38/16

(52) U.S. Cl. CPC A61K 38/465; A61K 38/164; A61K 31/7105

(57) ABSTRACT

Compositions and methods for treating Duchenne Muscular Dystrophy (DMD) are encompassed.

[0001] This application claims the benefit of priority to U.S. Provisional Application No. 63/076,250, filed Sep. 9, 2020; U.S. Provisional Application No. 63/152,114, filed Feb. 22, 2021; U.S. Provisional Patent Application No. 63/166,174, filed Mar. 25, 2021; and U.S. Provisional Application No. 63/179,850, filed Apr. 26, 2021; all of which are incorporated by reference in their entirety.

[0002] The instant application contains a Sequence Listing which has been submitted electronically in ASCII format and is hereby incorporated by reference in its entirety. Said ASCII copy, created on Sep. 7, 2021, is named 2021-09-07_01245-0024-00US_ST25.txt and is 646,734 bytes in size.

### INTRODUCTION AND SUMMARY

[0003] Muscular dystrophies (MD) are a group of more than 30 genetic diseases characterized by progressive weakness and degeneration of the skeletal muscles that control movement. Duchenne muscular dystrophy (DMD) is one of the most severe forms of MD that affects approximately 1 in 5000 boys and is characterized by progressive muscle weakness and premature death. Cardiomyopathy and heart failure are common, incurable and lethal features of DMD. The disease is caused by mutations in the gene encoding dystrophin (DMD), which result in loss of expression of dystrophin, causing muscle membrane fragility and progressive muscle wasting.

[0004] CRISPR-based genome editing can provide sequence-specific cleavage of genomic DNA using a Cas9 and a guide RNA. For example, a nucleic acid encoding the Cas9 enzyme and a nucleic acid encoding for the appropriate guide RNA can be provided on separate vectors or together on a single vector and administered in vivo or in vitro to knockout or correct a genetic mutation, for example. The approximately 20 nucleotides at the 5′ end of the guide RNA serves as the guide or spacer sequence that can be any sequence complementary to one strand of a genomic target location that has an adjacent protospacer adjacent motif (PAM). The PAM sequence is a short sequence adjacent to the Cas9 nuclease cut site that the Cas9 molecule requires for appropriate binding. The nucleotides 3′ of the guide or spacer sequence of the guide RNA serve as a scaffold sequence for interacting with Cas9. When a guide RNA and a Cas9 are expressed, the guide RNA will bind to Cas9 and direct it to the sequence complementary to the guide sequence, where it will then initiate a double-stranded break (DSB). To repair these breaks, cells typically use an error prone mechanism of non-homologous end joining (NHEJ) which can lead to disruption of function in the target gene through insertions or deletion of codons, shifts in the reading frame, or result in a premature stop codon triggering nonsense-mediated decay. See, e.g., Kumar et al. (2018) Front. Mol. Neurosci. Vol. 11, Article 413.

[0005] While gene editing strategies using systems (e.g., CRISPR) for treating DMD have been previously explored, these strategies have focused primarily on either: a) cutting at multiple different sites to excise large portions (e.g., one or more exons) of the dystrophin gene (see, e.g., Ousterout et al., 2015, Nat Commun 6:6244); or b) cutting in a single site to introduce indels that either result in a frame-shifting mutation and/or that destroy a splice acceptor/donor site in the dystrophin gene (see, e.g., Amoassi et al., 2018, Science, 362(6410):86-91). However, there remains a need for additional alternative and effective gene editing strategies for treating diseases like DMD.

[0006] In order for gene editing systems like CRISPR to be effective in treating diseases and disorders like DMD in a patient, effective delivery vectors of the CRISPR system components are necessary. Adeno-associated virus (AAV) administration of the CRISPR-Cas components in vivo or in vitro is attractive due to the early and ongoing successes of AAV vector design, manufacturing, and clinical stage administration for gene therapy. See, e.g., Wang et al. (2019) Nature Reviews Drug Discovery 18:358-378; Ran et al. (2015a) Nature 520: 186-101. However, the commonly used Streptococcus pyogenes (spCas9) is very large, and when used in AAV-based CRISPR/Cas systems, requires two AAV vectors—one vector carrying the nucleic acid encoding the spCas9, and the other carrying the nucleic acid encoding the guide RNA. One possible way to overcome this technical hurdle is to take advantage of the smaller orthologs of Cas9 derived from different prokaryotic species. Smaller Cas9's such as Staphylococcus aureus (SaCas9) and Staphylococcus lugdunensis (SluCas9) may be able to be manufactured on a single AAV vector together with a nucleic acid encoding one or more guide RNAs. One advantage of incorporating one or more guide RNAs on a single vector together with the smaller SaCas9 or SluCas9 is that doing so allows extreme design flexibility in situations where more than one guide RNA is desired for optimal performance. For example, one vector may be utilized to express SaCas9 or SluCas9 and one or more guide RNAs targeting a first genomic target (e.g., a pair of guide RNAs that together bind regions flanking a genomic target), and a second vector may be utilized to express multiple copies of the same (e.g., the same pair of guides in the first vector) or different guide RNAs targeting the same or a different genomic target. As another example, multiple copies of the same guide RNA may be beneficial, and the use of smaller Cas9's allow for multiple copies of guide RNA to be incorporated on the same vector as the Cas9, and also for even more copies of guide RNA when combined with a second vector. Compositions and methods utilizing these configurations have the benefit of reducing manufacturing costs, reducing complexity of administration routes and protocols, and allowing maximum flexibility with regard to using multiple copies of the same or different guide RNAs targeting the same or different genomic target sequences. In some instances, providing multiple copies of the same guide RNA improves the efficiency of the guide, improving an already successful system.

[0007] Provided herein are compositions and methods for treating DMD utilizing the smaller Cas9s from Staphylococcus aureus (SaCas9) and Staphylococcus lugdunensis (SluCas9). Compositions comprising a single AAV vector comprising a nucleic acid molecule encoding SaCas9 or SluCas9 and a guide RNA are provided.

[0008] Accordingly, the following non-limiting embodiments are provided.
[0009] Embodiment A1 is a composition comprising:

[0010] a. a single nucleic acid molecule comprising:
[0011] i. a nucleic acid encoding Staphylococcus aureus Cas9 (SaCas9) or Staphylococcus lugdunensis (SluCas9) and at least one, at least two, or at least three guide RNAs; or
[0012] ii. a nucleic acid encoding Staphylococcus aureus Cas9 (SaCas9) or Staphylococcus lugdunensis (SluCas9) and from one to n guide RNAs, wherein n is no more than the maximum number of guide RNAs that can be expressed from said nucleic acid; or
[0013] iii. a nucleic acid encoding Staphylococcus aureus Cas9 (SaCas9) or Staphylococcus lugdunensis (SluCas9) and 1, 2, or 3 guide RNAs; or

[0014] b. two nucleic acid molecules comprising:
[0015] i. a first nucleic acid encoding Staphylococcus aureus Cas9 (SaCas9) or Staphylococcus lugdunensis (SluCas9); and
   [0016] a second nucleic acid that does not encode a SaCas9 or SluCas9 and encodes any one of the following:
      [0017] 1. at least one, at least two, at least three, at least four, at least five, or at least six guide RNAs; or
      [0018] 2. from one to n guide RNAs, wherein n is no more than the maximum number of guide RNAs that can be expressed from said nucleic acid; or
      [0019] 3. from one to six guide RNAs; or
[0020] ii. a first nucleic acid encoding Staphylococcus aureus Cas9 (SaCas9) or Staphylococcus lugdunensis (SluCas9) and
   [0021] 1. at least one, at least two, or at least three guide RNAs; or
   [0022] 2. from one to n guide RNAs, wherein n is no more than the maximum number of guide RNAs that can be expressed from said nucleic acid; or
   [0023] 3. 1, 2, or 3 guide RNAs; and
[0024] a second nucleic acid that does not encode a SaCas9 or SluCas9, optionally wherein the second nucleic acid comprises any one of the following:
   [0025] 1. at least one, at least two, at least three, at least four, at least five, or at least six guide RNAs; or
   [0026] 2. from one to n guide RNAs, wherein n is no more than the maximum number of guide RNAs that can be expressed from said nucleic acid; or
   [0027] 3. from one to six guide RNAs; or
[0028] iii. a first nucleic acid encoding Staphylococcus aureus Cas9 (SaCas9) or Staphylococcus lugdunensis (SluCas9) and at least one, at least two, or at least three guide RNAs; and a second nucleic acid that does not encode a SaCas9 or SluCas9 and encodes from one to six guide RNAs; or
[0029] iv. a first nucleic acid encoding Staphylococcus aureus Cas9 (SaCas9) or Staphylococcus lugdunensis (SluCas9) and at least two guide RNAs, wherein at least one guide RNA binds upstream of a target sequence and at least one guide RNA binds downstream of the target sequence; and a second nucleic acid that does not encode a SaCas9 or SluCas9 and encodes at least one additional copy of each of the guide RNAs encoded in the first nucleic acid,

[0030] wherein the guide RNA(s) target a region in the dystrophin gene.
[0031] Embodiment A2 is a composition comprising two nucleic acid molecules comprising i) a first nucleic acid encoding Staphylococcus aureus Cas9 (SaCas9) or Staphylococcus lugdunensis (SluCas9) and a first and a second guide RNA that function to excise a portion of a DMD gene; and ii) a second nucleic acid encoding at least 2 or at least 3 copies of the first guide RNA and at least 2 or at least 3 copies of the second guide RNA.
[0032] Embodiment A3 is a composition comprising one or more nucleic acid molecules encoding an endonuclease and a pair of guide RNAs, wherein each guide RNA targets a different sequence in a DMD gene, wherein the endonuclease and pair of guide RNAs are capable of excising a DNA fragment from the DMD gene; wherein the DNA fragment is between 5-250 nucleotides in length.
[0033] Embodiment A4 is the composition of claim 3, wherein the endonuclease is a class 2, type II Cas endonuclease.
[0034] Embodiment A5 is the composition of claim 3, wherein the class 2, type II Cas endonuclease is SpCas9, SaCas9, or SluCas9.
[0035] Embodiment A6 is the composition of claim 3, wherein the endonuclease is not a class 2, type V Cas endonuclease.
[0036] Embodiment A7 is the composition of claim 3, wherein the excised DNA fragment comprises a splice acceptor site or a splice donor site.
[0037] Embodiment A8 is the composition of claim 3, wherein the excised DNA fragment comprises a premature stop codon in the DMD gene.
[0038] Embodiment A9 is the composition of claim 3, wherein the excised DNA fragment does not comprise an entire exon of the DMD gene.
[0039] Embodiment A10 is the composition of any one of claims 1-9, wherein the guide RNA comprises any one of the following:
   [0040] a. when SaCas9 is used, one or more spacer sequences selected from any one of SEQ ID NOs: 1-35, 1000-1078, and 3000-3069; or
   [0041] b. when SluCas9a is used, one or more spacer sequences selected from any one of SEQ ID NOs: 100-225, 2000-2116, and 4000-4251; or
   [0042] c. when SaCas9 is used, one or more spacer sequences comprising at least 20 contiguous nucleotides of a spacer sequence selected from any one of SEQ ID NOs: 1-35, 1000-1078, and 3000-3069; or
   [0043] d. when SluCas9a is used, one or more spacer sequences comprising at least 20 contiguous nucleotides of a spacer sequence selected from any one of SEQ ID NOs: 100-225, 2000-2116, and 4000-4251; or
   [0044] e. when SaCas9 is used, one or more spacer sequences that is at least 90% identical to any one of SEQ ID NOs: 1-35, 1000-1078, and 3000-3069; or
   [0045] f. when SluCas9 is used, one or more spacer sequences that is at least 90% identical to any one of SEQ ID NOs: 100-225, 2000-2116, and 4000-4251; or
   [0046] g. when SaCas9 is used with at least two guide RNAs, a first and second spacer sequence selected from any one of the following pairs of spacer sequences: SEQ ID NOs: 10 and 15; 10 and 16; 12 and 16; 1001 and 1005; 1001 and 15; 1001 and 16; 1003 and 1005; 16 and 1003; 12 and 1010; 12 and 1012; 12 and 1013; 10 and 1016; 1017 and 1005; 1017 and 16; 1018 and 16; 15 and 10; 16 and 10; 16 and 12; 1005 and 1001; 15 and 1001; 16 and 1001; 1005 and 1003; 1003 and 16; 1010 and 12; 1012 and 12; 1013 and 12; 1016 and 10; 1005 and 1017; 16 and 1017; and 16 and 1018; or
   [0047] h. when SaCas9 is used with at least two guide RNAs, at least 17, 18, 19, 20, or 21 contiguous nucleotides of a first and second spacer sequence selected from any one of the following pairs of spacer sequences: SEQ ID NOs: 10 and 15; 10 and 16; 12 and 16; 1001 and 1005; 1001 and 15; 1001 and 16; 1003 and 1005; 16 and 1003; 12 and 1010; 12 and 1012; 12 and 1013; 10 and 1016; 1017 and 1005; 1017 and 16; 1018 and 16; 15 and 10; 16 and 10; 16 and 12; 1005 and 1001; 15 and 1001; 16 and 1001; 1005 and 1003; 1003 and 16; 1010 and 12; 1012 and 12; 1013 and 12; 1016 and 10; 1005 and 1017; 16 and 1017; and 16 and 1018; or
   [0048] i. when SaCas9 is used with at least two guide RNAs, at least 90% identical to a first and second spacer sequence selected from any one of the following pairs of spacer sequences: SEQ ID NOs: 10 and 15; 10 and 16; 12 and 16; 1001 and 1005; 1001 and 15; 1001 and 16; 1003 and 1005; 16 and 1003; 12 and 1010; 12 and 1012; 12 and 1013; 10 and 1016; 1017 and 1005; 1017 and 16; 1018 and 16; 15 and 10; 16 and 10; 16 and 12; 1005 and 1001; 15 and 1001; 16 and 1001; 1005 and 1003; 1003 and 16; 1010 and 12; 1012 and 12; 1013 and 12; 1016 and 10; 1005 and 1017; 16 and 1017; and 16 and 1018; or
   [0049] j. when SluCas9 is used with at least two guide RNAs, a first and second spacer sequence selected from any one of the following pairs of spacer sequences: SEQ ID NOs: 148 and 134; 149 and 135; 150 and 135; 131 and 136; 151 and 136; 139 and 131; 139 and 151; 140 and 131; 140 and 151; 141 and 148; 144 and 149; 144 and 150; 145 and 131; 145 and 151; 146 and 148; 134 and 148; 135 and 149; 135 and 150; 136 and 131; 136 and 151; 131 and 139; 151 and 139; 131 and 140; 151 and 140; 148 and 141; 149 and 144; 150 and 144; 131 and 145; 151 and 145; and 148 and 146; or
   [0050] k. when SluCas9 is used with at least two guide RNAs, at least 17, 18, 19, 20, or 21 contiguous nucleotides of a first and second spacer sequence selected from any one of the following pairs of spacer sequences: SEQ ID NOs: 148 and 134; 149 and 135; 150 and 135; 131 and 136; 151 and 136; 139 and 131; 139 and 151; 140 and 131; 140 and 151; 141 and 148; 144 and 149; 144 and 150; 145 and 131; 145 and 151; 146 and 148; 134 and 148; 135 and 149; 135 and 150; 136 and 131; 136 and 151; 131 and 139; 151 and 139; 131 and 140; 151 and 140; 148 and 141; 149 and 144; 150 and 144; 131 and 145; 151 and 145; and 148 and 146; or
   [0051] l. when SluCas9 is used with at least two guide RNAs, at least 90% identical to a first and second spacer sequence selected from any one of the following pairs of spacer sequences: SEQ ID NOs: 148 and 134; 149 and 135; 150 and 135; 131 and 136; 151 and 136; 139 and 131; 139 and 151; 140 and 131; 140 and 151; 141 and 148; 144 and 149; 144 and 150; 145 and 131; 145 and 151; 146 and 148; 134 and 148; 135 and 149; 135 and 150; 136 and 131; 136 and 151; 131 and 139; 151 and 139; 131 and 140; 151 and 140; 148 and 141; 149 and 144; 150 and 144; 131 and 145; 151 and 145; and 148 and 146; or
   [0052] m. when SluCas9 is used with at least two guide RNAs, at least 90% identical to a first and second spacer sequence selected from any one of the following pairs of spacer sequences:
      [0053] i. SEQ ID NOS: 148 and 134,
      [0054] ii. SEQ ID Nos: 145 and 131,
      [0055] iii. SEQ ID Nos: 144 and 149;
      [0056] iv. SEQ ID Nos: 144 and 150; and
      [0057] v. SEQ ID Nos: 146 and 148; or
   [0058] n. when a SaCas9-KKH is used with at least two guide RNAs, at least 90% identical to a first and second spacer sequence selected from any one of the following pairs of spacer sequences:
      [0059] i. SEQ ID NOs: 12 and 1013; and
      [0060] ii. SEQ ID Nos: 12 and 1016.
[0061] Embodiment A11 is a composition comprising a single nucleic acid molecule encoding one or more guide RNAs and a Cas9, wherein the single nucleic acid molecule comprises:
   [0062] a. a first nucleic acid encoding one or more spacer sequences selected from any one of SEQ ID NOs: 1-35, 1000-1078, or 3000-3069 and a second nucleic acid encoding a Staphylococcus aureus Cas9 (SaCas9); or
   [0063] b. a first nucleic acid encoding one or more spacer sequences selected from any one of SEQ ID NOs: 100-225, 2000-2116, or 4000-4251 and a second nucleic acid encoding a Staphylococcus lugdunensis (SluCas9); or
   [0064] c. a first nucleic acid encoding one or more spacer sequences comprising at least 20 contiguous nucleotides of a spacer sequence selected from any one of SEQ ID NOs: 1-35, 1000-1078, or 3000-3069 and a second nucleic acid encoding a Staphylococcus aureus Cas9 (SaCas9); or
   [0065] d. a first nucleic acid encoding one or more spacer sequences comprising at least 20 contiguous nucleotides of a spacer sequence selected from any one of SEQ ID NOs: 100-225, 2000-2116, or 4000-4251 and a second nucleic acid encoding a Staphylococcus lugdunensis (SluCas9); or
   [0066] e. a first nucleic acid encoding one or more spacer sequences that is at least 90% identical to any one of SEQ ID NOs: 1-35, 1000-1078, or 3000-3069 and a second nucleic acid encoding a Staphylococcus aureus Cas9 (SaCas9); or
   [0067] f. a first nucleic acid encoding one or more spacer sequences that is at least 90% identical to any one of SEQ ID NOs: 100-225, 2000-2116, or 4000-4251 and a second nucleic acid encoding a Staphylococcus lugdunensis (SluCas9); or
   [0068] g. a first nucleic acid encoding a pair of guide RNAs comprising a first and second spacer sequence selected from any one of the following pairs of spacer sequences: SEQ ID NOs: 10 and 15; 10 and 16; 12 and 16; 1001 and 1005; 1001 and 15; 1001 and 16; 1003 and 1005; 16 and 1003; 12 and 1010; 12 and 1012; 12 and 1013; 10 and 1016; 1017 and 1005; 1017 and 16; 1018 and 16; 15 and 10; 16 and 10; 16 and 12; 1005 and 1001; 15 and 1001; 16 and 1001; 1005 and 1003; 1003 and 16; 1010 and 12; 1012 and 12; 1013 and 12; 1016 and 10; 1005 and 1017; 16 and 1017; and 16 and 1018; and a second nucleic acid encoding a Staphylococcus aureus Cas9 (SaCas9); or
   [0069] h. a first nucleic acid encoding a pair of guide RNAs comprising at least 17, 18, 19, 20, or 21 contiguous nucleotides of a first and second spacer sequence selected from any one of the following pairs of spacer sequences: SEQ ID NOs: 10 and 15; 10 and 16; 12 and 16; 1001 and 1005; 1001 and 15; 1001 and 16; 1003 and 1005; 16 and 1003; 12 and 1010; 12 and 1012; 12 and 1013; 10 and 1016; 1017 and 1005; 1017 and 16; 1018 and 16; 15 and 10; 16 and 10; 16 and 12; 1005 and 1001; 15 and 1001; 16 and 1001; 1005 and 1003; 1003 and 16; 1010 and 12; 1012 and 12; 1013 and 12; 1016 and 10; 1005 and 1017; 16 and 1017; and 16 and 1018; and a second nucleic acid encoding a Staphylococcus aureus Cas9 (SaCas9); or
   [0070] i. a first nucleic acid encoding a pair of guide RNAs that is at least 90% identical to a first and second spacer sequence selected from any one of the following pairs of spacer sequences: SEQ ID NOs: 10 and 15; 10 and 16; 12 and 16; 1001 and 1005; 1001 and 15; 1001 and 16; 1003 and 1005; 16 and 1003; 12 and 1010; 12 and 1012; 12 and 1013; 10 and 1016; 1017 and 1005; 1017 and 16; 1018 and 16; 15 and 10; 16 and 10; 16 and 12; 1005 and 1001; 15 and 1001; 16 and 1001; 1005 and 1003; 1003 and 16; 1010 and 12; 1012 and 12; 1013 and 12; 1016 and 10; 1005 and 1017; 16 and 1017; and 16 and 1018; and a second nucleic acid encoding a Staphylococcus aureus Cas9 (SaCas9); or
   [0071] j. a first nucleic acid encoding a pair of guide RNAs comprising a first and second spacer sequence selected from any one of the following pairs of spacer sequences: SEQ ID NOs: 148 and 134; 149 and 135; 150 and 135; 131 and 136; 151 and 136; 139 and 131; 139 and 151; 140 and 131; 140 and 151; 141 and 148; 144 and 149; 144 and 150; 145 and 131; 145 and 151; 146 and 148; 134 and 148; 135 and 149; 135 and 150; 136 and 131; 136 and 151; 131 and 139; 151 and 139; 131 and 140; 151 and 140; 148 and 141; 149 and 144; 150 and 144; 131 and 145; 151 and 145; and 148 and 146; and a second nucleic acid encoding a Staphylococcus lugdunensis (SluCas9); or
   [0072] k. a first nucleic acid encoding a pair of guide RNAs comprising at least 17, 18, 19, 20, or 21 contiguous nucleotides of a first and second spacer sequence selected from any one of the following pairs of spacer sequences: SEQ ID NOs: 148 and 134; 149 and 135; 150 and 135; 131 and 136; 151 and 136; 139 and 131; 139 and 151; 140 and 131; 140 and 151; 141 and 148; 144 and 149; 144 and 150; 145 and 131; 145 and 151; 146 and 148; 134 and 148; 135 and 149; 135 and 150; 136 and 131; 136 and 151; 131 and 139; 151 and 139; 131 and 140; 151 and 140; 148 and 141; 149 and 144; 150 and 144; 131 and 145; 151 and 145; and 148 and 146; and a second nucleic acid encoding a Staphylococcus lugdunensis (SluCas9); or
   [0073] l. a first nucleic acid encoding a pair of guide RNAs that is at least 90% identical to a first and second spacer sequence selected from any one of the following pairs of spacer sequences: SEQ ID NOs: 148 and 134; 149 and 135; 150 and 135; 131 and 136; 151 and 136; 139 and 131; 139 and 151; 140 and 131; 140 and 151; 141 and 148; 144 and 149; 144 and 150; 145 and 131; 145 and 151; 146 and 148; 134 and 148; 135 and 149; 135 and 150; 136 and 131; 136 and 151; 131 and 139; 151 and 139; 131 and 140; 151 and 140; 148 and 141; 149 and 144; 150 and 144; 131 and 145; 151 and 145; and 148 and 146; and a second nucleic acid encoding a Staphylococcus lugdunensis (SluCas9); or
   [0074] m. a first nucleic acid encoding a pair of guide RNAs that is at least 90% identical to a first and second spacer sequence selected from any one of the following pairs of spacer sequences:
      [0075] i. SEQ ID NOS: 148 and 134,
      [0076] ii. SEQ ID Nos: 145 and 131,
      [0077] iii. SEQ ID Nos: 144 and 149;
      [0078] iv. SEQ ID Nos: 144 and 150;
      [0079] v. SEQ ID Nos: 146 and 148;
   [0080] and a second nucleic acid encoding a Staphylococcus lugdunensis (SluCas9); or
   [0081] n. a first nucleic acid encoding a pair of guide RNAs that is at least 90% identical to a first and second spacer sequence selected from any one of the following pairs of spacer sequences:
      [0082] i. SEQ ID NOs: 12 and 1013; and
      [0083] ii. SEQ ID Nos: 12 and 1016;
      [0084] iii. and a second nucleic acid encoding a SaCas9-KKH.
[0085] Embodiment A12 is a composition comprising one or more nucleic acid molecules encoding a Staphylococcus lugdunensis (SluCas9) and at least two guide RNAs, wherein a first and second guide RNA target different sequences in a DMD gene, wherein the first and a second guide RNA comprise a sequence that is at least 90% identical to a first and second spacer sequence selected from any one of the following pairs of spacer sequences:
   [0086] i. SEQ ID NOS: 148 and 134,
   [0087] ii. SEQ ID Nos: 145 and 131,
   [0088] iii. SEQ ID Nos: 144 and 149;
   [0089] iv. SEQ ID Nos: 144 and 150;
   [0090] v. SEQ ID Nos: 146 and 148.
[0091] Embodiment A13 is a composition comprising one or more nucleic acid molecules encoding an endonuclease and at least two guide RNAs, wherein the guide RNAs each target a different sequence in a DMD gene, wherein the guide RNAs each comprise a sequence that is at least 90% identical to a first and second spacer sequence selected from any one of the following pairs of spacer sequences:
   [0092] i. SEQ ID NOs: 12 and 1013; and
   [0093] ii. SEQ ID Nos: 12 and 1016; and
   [0094] b. a second nucleic acid encoding a SaCas9-KKH.
[0095] Embodiment A14 is the composition of any one of the preceding claims, wherein the first and/or the second nucleic acid, if present, encodes at least two guide RNAs.
[0096] Embodiment A15 is the composition of any one of the preceding claims, wherein the first and/or the second nucleic acid, if present, encodes at least three guide RNAs.
[0097] Embodiment A16 is the composition of any one of the preceding claims, wherein the first and/or the second nucleic acid, if present, encodes at least four guide RNAs.
[0098] Embodiment A17 is the composition of any one of the preceding claims, wherein the first and/or the second nucleic acid, if present, encodes at least five guide RNAs.
[0099] Embodiment A18 is the composition of any one of the preceding claims, wherein the first and/or the second nucleic acid, if present, encodes at least six guide RNAs.
[0100] Embodiment A19 is the composition of any one of the preceding claims, wherein the first and/or the second nucleic acid, if present, encodes at least seven guide RNAs.
[0101] Embodiment A20 is the composition of any one of the preceding claims, wherein the first and/or the second nucleic acid, if present, encodes at least eight guide RNAs.
[0102] Embodiment A21 is the composition of any one of the preceding claims, wherein the first nucleic acid comprises a nucleotide sequence encoding an endonuclease and at least one, at least two, or at least three guide RNAs.
[0103] Embodiment A22 is the composition of any one of the preceding claims, wherein the first nucleic acid comprises a nucleotide sequence encoding an endonuclease and from one to n guide RNAs, wherein n is no more than the maximum number of guide RNAs that can be expressed from said nucleic acid.
[0104] Embodiment A23 is the composition of any one of the preceding claims, wherein the first nucleic acid comprises a nucleotide sequence encoding an endonuclease and from one to three guide RNAs.
[0105] Embodiment A24 is the composition of any one of the preceding claims, wherein the second nucleic acid, if present, encodes at least one, at least two, at least three, at least four, at least five, or at least six guide RNAs.
[0106] Embodiment A25 is the composition of any one of the preceding claims, wherein the second nucleic acid, if present, encodes from one to n guide RNAs, wherein n is no more than the maximum number of guide RNAs that can be expressed from said nucleic acid.
[0107] Embodiment A26 is the composition of any one of the preceding claims, wherein the second nucleic acid, if present, encodes from one to six guide RNAs.
[0108] Embodiment A27 is the composition of any one of the preceding claims, wherein the second nucleic acid, if present, encodes 2-10, 2-9, 2-8, 2-7, 2-6, 2-5, 2-4, or 2-3 guide RNAs.
[0109] Embodiment A28 is the composition of any one of the preceding claims, wherein the second nucleic acid, if present, encodes 2, 3, 4, 5, or 6 guide RNAs.
[0110] Embodiment A29 is the composition of any one of the preceding claims, comprising at least two nucleic acid molecules, wherein the guide RNA encoded by the first nucleic acid and the second nucleic acid are the same.
[0111] Embodiment A30 is the composition of any one of the preceding claims, comprising at least two nucleic acid molecules, wherein the guide RNA encoded by the first nucleic acid and the second nucleic acid are different.
[0112] Embodiment A31 is the composition of any one of the preceding claims, comprising at least two nucleic acid molecules encoding at least two guide RNAs, wherein at least one guide RNA binds to a target sequence within an exon in the DMD gene that is upstream of a premature stop codon, and wherein at least one guide RNA binds to a target sequence within an exon in the DMD gene that is downstream of a premature stop codon.
[0113] Embodiment A32 is the composition of any one of the preceding claims, comprising at least two nucleic acid molecules, wherein the first nucleic acid molecule and the second nucleic acid molecule each encode the same guide RNA.
[0114] Embodiment A33 is the composition of any one of the preceding claims, comprising at least two nucleic acid molecules each encoding at least one guide RNA, wherein the second nucleic acid molecule encodes a guide RNA that binds to the same target sequence as the guide RNA in the first nucleic acid molecule.
[0115] Embodiment A34 is the composition of any one of the preceding claims, comprising at least two nucleic acid molecules, wherein the second nucleic acid molecule encodes at least 2, at least 3, at least 4, at least 5, or at least 6 guide RNAs, wherein the guide RNAs in the second nucleic acid molecule bind to the same target sequence as the guide RNA in the first nucleic acid molecule.
[0116] Embodiment A35 is the composition of any one of the preceding claims, wherein the composition comprises at least two nucleic acid molecules, wherein the first nucleic acid molecule comprises a sequence encoding an endonuclease, wherein the second nucleic acid molecule encodes a first guide RNA and a second guide RNA, wherein the first guide RNA and the second guide RNA are not the same sequence, and wherein the second nucleic acid molecule does not encode an endonuclease.
[0117] Embodiment A36 is the composition of claim 35, wherein the first nucleic acid molecule also encodes a copy of the first guide RNA and a copy of the second guide RNA.
[0118] Embodiment A37 is the composition of claim 35 or 36, wherein the second nucleic acid molecule encodes two copies of the first guide RNA and two copies of the second guide RNA.
[0119] Embodiment A38 is the composition of any one of claims 35-37, wherein the second nucleic acid molecule encodes three copies of the first guide RNA and three copies of the second guide RNA.
[0120] Embodiment A39 is the composition of any one of claims 35-37, wherein the first nucleic acid molecule comprises from 5′ to 3′ with respect to the plus strand: the reverse complement of a first guide RNA scaffold sequence, the reverse complement of a nucleotide sequence encoding the first guide RNA sequence, the reverse complement of a promoter for expression of the nucleotide sequence encoding the first guide RNA sequence, a promoter for expression of a nucleotide sequence encoding the endonuclease, a nucleotide sequence encoding an endonuclease, a polyadenylation sequence, a promoter for expression of the second guide RNA in the same direction as the promoter for the endonuclease, the second guide RNA sequence, and a second guide RNA scaffold sequence.
[0121] Embodiment A40 is the composition of claim 39, wherein the promoter for expression of the nucleotide sequence encoding the first guide RNA sequence in the first nucleic acid molecule is a U6 promoter and the promoter for expression of the nucleotide sequence encoding the second guide RNA in the first nucleic acid molecule is a U6 promoter.
[0122] Embodiment A41 is the composition of any one of claims 35-40, wherein the first nucleic acid molecule is in a first vector, and wherein the second nucleic acid is in a separate second vector.
[0123] Embodiment A42 is the composition of any one of claims 35-41, wherein the first nucleic acid molecule encodes a Staphylococcus aureus Cas9 (SaCas9) endonuclease, and wherein the first guide RNA comprises the first sequence and the second guide RNAs comprises the second sequence from any one the following pairs of sequences: SEQ ID NOs: 10 and 15; 10 and 16; 12 and 16; 1001 and 1005; 1001 and 15; 1001 and 16; 1003 and 1005; 16 and 1003; 12 and 1010; 12 and 1012; 12 and 1013; 10 and 1016; 1017 and 1005; 1017 and 16; 1018 and 16; 15 and 10; 16 and 10; 16 and 12; 1005 and 1001; 15 and 1001; 16 and 1001; 1005 and 1003; 1003 and 16; 1010 and 12; 1012 and 12; 1013 and 12; 1016 and 10; 1005 and 1017; 16 and 1017; and 16 and 1018.
[0124] Embodiment A43 is the composition of claim 42, wherein the first guide RNA comprises the sequence of SEQ ID NO: 12 and the second guide RNA comprises the sequence of SEQ ID NO: 1013.
[0125] Embodiment A44 is the composition of any one of claims 35-43, wherein the first nucleic acid molecule encodes a Staphylococcus lugdunensis (SluCas9) endonuclease, and wherein the first guide RNA comprises the first sequence and the second guide RNAs comprises the second sequence from any one the following pairs of sequences: SEQ ID NOs: 148 and 134; 149 and 135; 150 and 135; 131 and 136; 151 and 136; 139 and 131; 139 and 151; 140 and 131; 140 and 151; 141 and 148; 144 and 149; 144 and 150; 145 and 131; 145 and 151; 146 and 148; 134 and 148; 135 and 149; 135 and 150; 136 and 131; 136 and 151; 131 and 139; 151 and 139; 131 and 140; 151 and 140; 148 and 141; 149 and 144; 150 and 144; 131 and 145; 151 and 145; and 148 and 146.
[0126] Embodiment A45 is the composition of claim 44, wherein:
   [0127] i. the first guide RNA comprises the sequence of SEQ ID NO: 148 and the second guide RNA comprises the sequence of SEQ ID NO: 134; or
   [0128] ii. the second guide RNA comprises the sequence of SEQ ID NO: 145 and the second guide RNA comprises the sequence of SEQ ID NO: 131.
[0129] Embodiment A46 is the composition of any one of claims 35-45, wherein the first nucleic acid is in a first vector, and wherein the second nucleic acid is in a separate second vector.
[0130] Embodiment A47 is the composition of claim 46, wherein the first and second vectors are viral vectors.
[0131] Embodiment A48 is the composition of claim 47, wherein the viral vectors are AAV9 vectors.
[0132] Embodiment A49 is the composition of claim 48, wherein the AAV9 vectors are each less than 5 kb, less than 4.9 kb, less than 4.85, less than 4.8, or less than 4.75 kb from ITR to ITR in size, inclusive of both ITRs.
[0133] Embodiment A50 is the composition of claim 48 or 49, wherein the AAV9 vectors are each between 3.9-5 kb, 4-5 kb, 4.2-5 kb, 4.4-5 kb, 4.6-5 kb, 4.7-5 kb, 3.9-4.9 kb, 4.2-4.9 kb, 4.4-4.9 kb, 4.7-4.9 kb, 3.9-4.85 kb, 4.2-4.85 kb, 4.4-4.85 kb, 4.6-4.85 kb, 4.7-4.85 kb, 4.7-4.9 kb, 3.9-4.8 kb, 4.2-4.8 kb, 4.4-4.8 kb or 4.6-4.8 kb from ITR to ITR in size, inclusive of both ITRs.
[0134] Embodiment A51 is the composition of any one of claims 47-50, wherein the first vector is between 4.4-4.85 kb from ITR to ITR in size, inclusive of both ITRs.
[0135] Embodiment A52 is the composition of any one of the preceding claims, wherein the guide RNA binds to one or more target sequences within a DMD gene.
[0136] Embodiment A53 is the composition of any one of the preceding claims, wherein the guide RNA binds to one or more target sequences within an exon of the DMD gene.
[0137] Embodiment A54 is the composition of any one of the preceding claims, comprising two guide RNAs, wherein i) each guide RNA targets a sequence within an exon; ii) one guide RNA targets a sequence within an exon and one targets a sequence within an intron; or iii) each guide RNA targets a sequence within an intron.
[0138] Embodiment A55 is the composition of any one of the preceding claims, comprising at least two guide RNAs, wherein i) each guide RNA targets the same genomic target sequence; ii) each guide RNA targets a different target sequence; or iii) at least one guide RNA targets one sequence and at least one guide RNA targets a different sequence.
[0139] Embodiment A56 is the composition of any one of the preceding claims, comprising a guide RNA that binds to an exon of the DMD gene, wherein the exon is selected from exon 43, 44, 45, 50, 51, and 53.
[0140] Embodiment A57 is the composition of any one of the preceding claims, comprising at least two guide RNAs that binds to an exon of the DMD gene, wherein at least one guide RNA binds to a target sequence within an exon in the DMD gene, and at least one guide RNA binds to a different target sequence within the same exon in the DMD gene.
[0141] Embodiment A58 is the composition of any one of the preceding claims, comprising at least two guide RNAs, wherein at least one guide RNA binds to a target sequence within an exon that is upstream of a premature stop codon, and at least one guide RNA binds to a target sequence within an exon that is downstream of a premature stop codon.
[0142] Embodiment A59 is the composition of any one of the preceding claims, comprising at least two guide RNAs, wherein at least one guide RNA binds to a target sequence within an exon in the DMD gene, and at least one guide RNA binds to a different target sequence within the same exon in the DMD gene, wherein when expressed in vivo or in vivo, a portion of the exon is excised.
[0143] Embodiment A60 is the composition of any one of the preceding claims, comprising at least two guide RNAs, wherein once expressed in vitro or in vivo in combination with an RNA-guided endonuclease, the guide RNAs excise a portion of the exon.
[0144] Embodiment A61 is the composition of any one of the preceding claims, comprising at least two guide RNAs, wherein once expressed in vitro or in vivo in combination with an RNA-guided endonuclease, the guide RNAs excise a portion of the exon, and wherein the portion of the exon remaining after excision are rejoined with a one nucleotide insertion.
[0145] Embodiment A62 is the composition of any one of the preceding claims, comprising at least two guide RNAs, wherein once expressed in vitro or in vivo in combination with an RNA-guided endonuclease, the guide RNAs excise a portion of the exon, wherein the portion of the exon remaining after excision is rejoined without a nucleotide insertion.
[0146] Embodiment A63 is the composition of any one of the preceding claims, comprising at least two guide RNAs, wherein once expressed in vitro or in vivo in combination with an RNA-guided endonuclease, the guide RNAs excise a portion of the exon, wherein the size of the excised portion of the exon is between 5 and 250 nucleotides in length.
[0147] Embodiment A64 is the composition of any one of the preceding claims, comprising at least two guide RNAs, wherein once expressed in vitro or in vivo in combination with an RNA-guided endonuclease, the guide RNAs excise a portion of the exon, wherein the size of the excised portion of the exon is between 5 and 250, 5 and 200, 5 and 150, 5 and 100, 5 and 75, 5 and 50, 5 and 25, 5 and 10, 20 and 250, 20 and 200, 20 and 150, 20 and 100, 20 and 75, 20 and 50, 20 and 25, 50 and 250, 50 and 200, 50 and 150, 50 and 100, and 50 and 75 nucleotides.
[0148] Embodiment A65 is the composition of any one of the preceding claims, comprising at least two guide RNAs, wherein once expressed in vitro or in vivo in combination with an RNA-guided endonuclease, the guide RNAs excise a portion of the exon, wherein the size of the excised portion of the exon is between 8 and 167 nucleotides.
[0149] Embodiment A66 is the composition of any one of the preceding claims, wherein the guide RNA is an sgRNA.
[0150] Embodiment A67 is the composition of any one of the preceding claims, wherein the guide RNA is modified.
[0151] Embodiment A68 is the composition of any one of the preceding claims, wherein the guide RNA is modified, and wherein the modification alters one or more 2′ positions and/or phosphodiester linkages.
[0152] Embodiment A69 is the composition of any one of the preceding claims, wherein the guide RNA is modified, and wherein the modification alters one or more, or all, of the first three nucleotides of the guide RNA and/or the last three nucleotides of the sgRNA.
[0153] Embodiment A70 is the composition of any one of claims 66-68, wherein the modification alters one or more, or all, of the last three nucleotides of the guide RNA.
[0154] Embodiment A71 is the composition of any one of the preceding claims, wherein the guide RNA is modified, and wherein the modification includes one or more of a phosphorothioate modification, a 2′-OMe modification, a 2′-O-MOE modification, a 2′-F modification, a 2′-O-methine-4′ bridge modification, a 3′-thiophosphonoacetate modification, or a 2′-deoxy modification.
[0155] Embodiment A72 is the composition of any one of the preceding claims, wherein the composition further comprises a pharmaceutically acceptable excipient.
[0156] Embodiment A73 is the composition of any one of the preceding claims, wherein the composition is associated with a lipid nanoparticle (LNP).
[0157] Embodiment A74 is the composition of any one of the preceding claims, wherein the composition is associated with a viral vector.
[0158] Embodiment A75 is the composition of any one of the preceding claims, wherein the composition is associated with a viral vector, and wherein the viral vector is an adeno-associated virus vector, a lentiviral vector, an integrase-deficient lentiviral vector, an adenoviral vector, a vaccinia viral vector, an alphaviral vector, or a herpes simplex viral vector.
[0159] Embodiment A76 is the composition of any one of the preceding claims, wherein the composition is associated with a viral vector, and wherein the viral vector is an adeno-associated virus (AAV) vector.
[0160] Embodiment A77 is the composition of any one of the preceding claims, wherein the composition is associated with a viral vector, wherein the viral vector is an adeno-associated virus (AAV) vector, and wherein the AAV vector is an AAV1, AAV2, AAV3, AAV4, AAV5, AAV6, AAV7, AAV8, AAVrh10, AAVrh74, or AAV9 vector, wherein the number following AAV indicates the AAV serotype.
[0161] Embodiment A78 is the composition of any one of the preceding claims, wherein the composition is associated with a viral vector, wherein the viral vector is an adeno-associated virus (AAV) vector, and wherein the AAV vector is an AAV serotype 9 (AAV9) vector.
[0162] Embodiment A79 is the composition of claim 78, wherein the AAV serotype 9 vector is less than 5 kb, less than 4.9 kb, less than 4.85, less than 4.8, or less than 4.75 kb from ITR to ITR in size, inclusive of both ITRs.
[0163] Embodiment A80 is the composition of claim 78 or 79, wherein the AAV serotype 9 vector is between 3.9-5 kb, 4-5 kb, 4.2-5 kb, 4.4-5 kb, 4.6-5 kb, 4.7-5 kb, 3.9-4.9 kb, 4.2-4.9 kb, 4.4-4.9 kb, 4.7-4.9 kb, 3.9-4.85 kb, 4.2-4.85 kb, 4.4-4.85 kb, 4.6-4.85 kb, 4.7-4.85 kb, 4.7-4.9 kb, 3.9-4.8 kb, 4.2-4.8 kb, 4.4-4.8 kb or 4.6-4.8 kb from ITR to ITR in size, inclusive of both ITRs.
[0164] Embodiment A81 is the composition of any one of claims 78-80, wherein the AAV serotype 9 vector is between 4.4-4.85 kb from ITR to ITR in size, inclusive of both ITRs.
[0165] Embodiment A82 is the composition of any one of the preceding claims, wherein the composition is associated with a viral vector, wherein the viral vector is an adeno-associated virus (AAV) vector, and wherein the AAV vector is an AAVrh10 vector.
[0166] Embodiment A83 is the composition of any one of the preceding claims, wherein the composition is associated with a viral vector, wherein the viral vector is an adeno-associated virus (AAV) vector, and wherein the AAV vector is an AAVrh74 vector.
[0167] Embodiment A84 is the composition of any one of the preceding claims, wherein the composition is associated with a viral vector, wherein the viral vector comprises a tissue-specific promoter.
[0168] Embodiment A85 is the composition of any one of the preceding claims, wherein the composition is associated with a viral vector, wherein the viral vector comprises a muscle-specific promoter, optionally wherein the muscle-specific promoter is a muscle creatine kinase promoter, a desmin promoter, an MHCK7 promoter, an SPc5-12 promoter, or a CK8e promoter.
[0169] Embodiment A86 is the composition of any one of the preceding claims, wherein the composition is associated with a viral vector, wherein the viral vector comprises any one or more of the following promoters: U6, H1, and 7SK promoter.
[0170] Embodiment A87 is the composition of any one of the preceding claims, comprising a nucleic acid encoding SaCas9, wherein at least one guide RNA comprises a spacer sequence selected from any one of SEQ ID NOs: 12, 15, 16, 20, 27, 28, 32, 33, and 35.
[0171] Embodiment A88 is the composition of any one of the preceding claims, comprising a nucleic acid encoding SaCas9, wherein the SaCas9 comprises the amino acid sequence of SEQ ID NO: 711.
[0172] Embodiment A89 is the composition of any one of the preceding claims, comprising a nucleic acid encoding SaCas9, wherein the SaCas9 is a variant of the amino acid sequence of SEQ ID NO: 711.
[0173] Embodiment A90 is the composition of any one of the preceding claims, comprising a nucleic acid encoding SaCas9, wherein the SaCas9 comprises an amino acid sequence selected from any one of SEQ ID NOs: 715-717.
[0174] Embodiment A91 is the composition of any one of the preceding claims, comprising a nucleic acid encoding SluCas9, wherein at least one guide RNA comprises a spacer sequence selected from any one of SEQ ID NOs: 131, 134, 135, 136, 139, 144, 148, 149, 150, 151, 179, 184, 201, 210, 223, 224, and 225.
[0175] Embodiment A92 is the composition of any one of the preceding claims, comprising a nucleic acid encoding SluCas9, wherein the SluCas9 comprises the amino acid sequence of SEQ ID NO: 712.
[0176] Embodiment A93 is the composition of any one of the preceding claims, comprising a nucleic acid encoding SluCas9, wherein the SluCas9 is a variant of the amino acid sequence of SEQ ID NO: 712.
[0177] Embodiment A94 is the composition of any one of the preceding claims, comprising a nucleic acid encoding SluCas9, wherein the SluCas9 comprises an amino acid sequence selected from any one of SEQ ID NOs: 718-720.
[0178] Embodiment A95 is the composition of claim 1, wherein the single nucleic acid molecule or the first nucleic acid comprises from 5′ to 3′ with respect to the plus strand: the reverse complement of a nucleotide sequence encoding a first guide RNA scaffold sequence, the reverse complement of a nucleotide sequence encoding the first guide RNA sequence, the reverse complement of a promoter for expression of the nucleotide sequence encoding the first guide RNA sequence, a promoter for expression of a nucleotide sequence encoding Staphylococcus aureus Cas9 (SaCas9) or Staphylococcus lugdunensis (SluCas9), a nucleotide sequence encoding the SaCas9 or SluCas9, a polyadenylation sequence, a promoter for expression of the second guide RNA in the same direction as the promoter for the SaCas9 or SluCas9, a nucleotide sequence encoding the second guide RNA sequence, and a nucleotide sequence encoding the second guide RNA scaffold sequence.
[0179] Embodiment A96 is the composition of claim 95, wherein the promoter for expression of the nucleic acid encoding the first guide RNA sequence is a U6 promoter and the promoter for expression of the nucleic acid encoding the second guide RNA is a U6 promoter.
[0180] Embodiment A97 is the composition of claim 95 or 96, wherein the SaCas9 or SluCas9 comprise at least two nuclear localization signals (NLSs).
[0181] Embodiment A98 is the composition of claim 97, wherein the SaCas9 or SluCas9 comprise a c-Myc NLS fused to the N-terminus of the SaCas9 or SluCas9, optionally by means of a linker. Embodiment A99 is the composition of claim 97 or 98, wherein the SaCas9 or SluCas9 comprise an SV40 NLS fused to the C-terminus of the SaCas9 or SluCas9, optionally by means of a linker.
[0182] Embodiment A100 is the composition of any one of claims 97-99, wherein the SaCas9 or SluCas9 comprise a nucleoplasmin NLS fused to the C-terminus of the SaCas9 or SluCas9, optionally by means of a linker.
[0183] Embodiment A101 is the composition of any one of claims 97-100, wherein the SaCas9 or SluCas9 comprise:
   [0184] i. a c-Myc NLS fused to the N-terminus of the SaCas9 or SluCas9, optionally by means of a linker,
   [0185] ii. an SV40 NLS fused to the C-terminus of the SaCas9 or SluCas9, optionally by means of a linker, and
   [0186] iii. a nucleoplasmin NLS fused to the C-terminus of the SV40 NLS, optionally by means of a linker,
[0187] Embodiment A102 is the composition of any one of claims 95-101, wherein the scaffold sequence for the first guide RNA comprises the sequence of SEQ ID NO: 901.
[0188] Embodiment A103 is the composition of any one of claims 95-101, wherein the scaffold sequence for the second guide RNA comprises the sequence of SEQ ID NO: 901.
[0189] Embodiment A104 is the composition of any one claims 95-103, wherein the single nucleic acid molecule or the first nucleic acid is less than 5 kb, less than 4.9 kb, 4.85, 4.8, or 4.75 kb in size.
[0190] Embodiment A105 is the composition of any one of claims 95-104, wherein the single nucleic acid molecule or the first nucleic acid is between 3.9-5 kb, 4-5 kb, 4.2-5 kb, 4.4-5 kb, 4.6-5 kb, 4.7-5 kb, 3.9-4.9 kb, 4.2-4.9 kb, 4.4-4.9 kb, 4.7-4.9 kb, 3.9-4.85 kb, 4.2-4.85 kb, 4.4-4.85 kb, 4.6-4.85 kb, 4.7-4.85 kb, 4.7-4.9 kb, 3.9-4.8 kb, 4.2-4.8 kb, 4.4-4.8 kb or 4.6-4.8 kb in size.
[0191] Embodiment A106 is the composition of claim 105, wherein the single nucleic acid molecule or the first nucleic acid is between 4.4-4.85 kb from ITR to ITR in size.
[0192] Embodiment A107 is a composition comprising a guide RNA encoded by a sequence comprising any one of SEQ ID NOs: 1-35, 1000-1078, or 3000-3069 or complements thereof.
[0193] Embodiment A108 is a composition comprising a guide RNA encoded by a sequence comprising any one of SEQ ID NOs: 100-225, 2000-2116, or 4000-4251 or complements thereof.
[0194] Embodiment A109 is the composition of any one of claims 1-108 for use in treating Duchenne Muscular Dystrophy (DMD).
[0195] Embodiment A110 is the composition of any one of claims 1-108 for use in making one or more double strand breaks in any one or more of exons 43, 44, 45, 50, 51, or 53 of the dystrophin gene.
[0196] Embodiment A111 is a method of treating Duchenne Muscular Dystrophy (DMD), the method comprising delivering to a cell the composition of any one of claims 1-107.
[0197] Embodiment A112 is a method of treating Duchenne Muscular Dystrophy (DMD), the method comprising delivering to a cell a single nucleic acid molecule comprising:
   [0198] i. a nucleic acid encoding one or more guide RNAs, wherein the one or more guide RNAs comprise:
      [0199] 1. a spacer sequence selected from SEQ ID NOs: 1-35, 1000-1078, or
      [0200] 2. a spacer sequence comprising at least 20 contiguous nucleotides of a spacer sequence selected from SEQ ID NOs: 1-35, 1000-1078, or 3000-3069; or
      [0201] 3. a spacer sequence that is at least 90% identical to any one of SEQ ID NOs: 1-35, 1000-1078, 3000-3069; and
   [0202] ii. a nucleic acid encoding a Staphylococcus aureus Cas9 (SaCas9).
[0203] Embodiment A113 is a method of treating Duchenne Muscular Dystrophy (DMD), the method comprising delivering to a cell a single nucleic acid molecule comprising:
   [0204] a. a nucleic acid molecule encoding one or more guide RNAs, wherein the one or more guide RNAs comprise:
      [0205] i. a spacer sequence selected from SEQ ID NOs: 100-225, 2000-2116, or 4000-4251;
      [0206] ii. a spacer sequence comprising at least 20 contiguous nucleotides of a spacer sequence selected from SEQ ID NOs: 100-225, 2000-2116, or 4000-4251; or
      [0207] iii. a spacer sequence that is at least 90% identical to any one of SEQ ID NOs: 100-225, 2000-2116, or 4000-4251; and
   [0208] b. a nucleic acid molecule encoding Staphylococcus lugdunensis (SluCas9).
[0209] Embodiment A114 is a method of treating Duchenne Muscular Dystrophy (DMD), the method comprising delivering to a cell a single nucleic acid molecule comprising:
   [0210] i. a nucleic acid encoding a pair of guide RNAs comprising:
      [0211] 1. a first and second spacer sequence selected from any one of SEQ ID NOs: 10 and 15; 10 and 16; 12 and 16; 1001 and 1005; 1001 and 15; 1001 and 16; 1003 and 1005; 16 and 1003; 12 and 1010; 12 and 1012; 12 and 1013; 10 and 1016; 1017 and 1005; 1017 and 16; 1018 and 16; 15 and 10; 16 and 10; 16 and 12; 1005 and 1001; 15 and 1001; 16 and 1001; 1005 and 1003; 1003 and 16; 1010 and 12; 1012 and 12; 1013 and 12; 1016 and 10; 1005 and 1017; 16 and 1017; and 16 and 1018;
      [0212] 2. a first and second spacer sequence comprising at least 17, 18, 19, 20, or 21 contiguous nucleotides of any one of SEQ ID NOs: 10 and 15; 10 and 16; 12 and 16; 1001 and 1005; 1001 and 15; 1001 and 16; 1003 and 1005; 16 and 1003; 12 and 1010; 12 and 1012; 12 and 1013; 10 and 1016; 1017 and 1005; 1017 and 16; 1018 and 16; 15 and 10; 16 and 10; 16 and 12; 1005 and 1001; 15 and 1001; 16 and 1001; 1005 and 1003; 1003 and 16; 1010 and 12; 1012 and 12; 1013 and 12; 1016 and 10; 1005 and 1017; 16 and 1017; and 16 and 1018; or
      [0213] 3. a first and second spacer sequence that is at least 90% identical to any one of SEQ ID NOs: 10 and 15; 10 and 16; 12 and 16; 1001 and 1005; 1001 and 15; 1001 and 16; 1003 and 1005; 16 and 1003; 12 and 1010; 12 and 1012; 12 and 1013; 10 and 1016; 1017 and 1005; 1017 and 16; 1018 and 16; 15 and 10; 16 and 10; 16 and 12; 1005 and 1001; 15 and 1001; 16 and 1001; 1005 and 1003; 1003 and 16; 1010 and 12; 1012 and 12; 1013 and 12; 1016 and 10; 1005 and 1017; 16 and 1017; and 16 and 1018; and
   [0214] ii. a nucleic acid encoding a Staphylococcus aureus Cas9 (SaCas9).
[0215] Embodiment A115 is a method of treating Duchenne Muscular Dystrophy (DMD), the method comprising delivering to a cell a single nucleic acid molecule comprising:
   [0216] i. a nucleic acid encoding a pair of guide RNAs comprising:
      [0217] 1. a first and second spacer sequence selected from any one of SEQ ID NOs: 148 and 134; 149 and 135; 150 and 135; 131 and 136; 151 and 136; 139 and 131; 139 and 151; 140 and 131; 140 and 151; 141 and 148; 144 and 149; 144 and 150; 145 and 131; 145 and 151; and 146 and 148;
      [0218] 2. a first and second spacer sequence comprising at least 17, 18, 19, 20, or 21 contiguous nucleotides of any one of SEQ ID NOs: 148 and 134; 149 and 135; 150 and 135; 131 and 136; 151 and 136; 139 and 131; 139 and 151; 140 and 131; 140 and 151; 141 and 148; 144 and 149; 144 and 150; 145 and 131; 145 and 151; 146 and 148; 134 and 148; 135 and 149; 135 and 150; 136 and 131; 136 and 151; 131 and 139; 151 and 139; 131 and 140; 151 and 140; 148 and 141; 149 and 144; 150 and 144; 131 and 145; 151 and 145; and 148 and 146; or
      [0219] 3. a first and second spacer sequence that is at least 90% identical to any one of SEQ ID NOs: 148 and 134; 149 and 135; 150 and 135; 131 and 136; 151 and 136; 139 and 131; 139 and 151; 140 and 131; 140 and 151; 141 and 148; 144 and 149; 144 and 150; 145 and 131; 145 and 151; 146 and 148; 134 and 148; 135 and 149; 135 and 150; 136 and 131; 136 and 151; 131 and 139; 151 and 139; 131 and 140; 151 and 140; 148 and 141; 149 and 144; 150 and 144; 131 and 145; 151 and 145; and 148 and 146; and

[0220] a nucleic acid encoding a Staphylococcus lugdunensis (SluCas9).
[0221] Embodiment A116 is the method of any one of the previous method or use claims, wherein the single nucleic acid molecule is delivered to the cell on a single vector.
[0222] Embodiment A117 is the method of any one of the previous method or use claims, comprising a nucleic acid molecule encoding SaCas9, wherein the spacer sequence is selected from any one of SEQ ID NOs: 12, 15, 16, 20, 27, 28, 32, 33, and 35.
[0223] Embodiment A118 is the method of any one of the previous method or use claims, comprising a nucleic acid molecule encoding SaCas9, wherein the SaCas9 comprises the amino acid sequence of SEQ ID NO: 711.
[0224] Embodiment A119 is the method of any one of the previous method or use claims, comprising a nucleic acid molecule encoding SaCas9, wherein the SaCas9 is a variant of the amino acid sequence of SEQ ID NO: 711.
[0225] Embodiment A120 is the method of any one of the previous method or use claims, comprising a nucleic acid molecule encoding SaCas9, wherein the SaCas9 comprises an amino acid sequence selected from any one of SEQ ID NOs: 715-717.
[0226] Embodiment A121 is the method of any one of the previous method or use claims, comprising a nucleic acid molecule encoding SluCas9, wherein the spacer sequence is selected from any one of SEQ ID NOs: 131, 134, 135, 136, 139, 144, 148, 149, 150, 151, 179, 184, 201, 210, 223, 224, and 225.
[0227] Embodiment A122 is the method of any one of the previous method or use claims, comprising a nucleic acid molecule encoding SluCas9, wherein the SluCas9 comprises the amino acid sequence of SEQ ID NO: 712.
[0228] Embodiment A123 is the method of any one of the previous method or use claims, comprising a nucleic acid molecule encoding SluCas9, wherein the SluCas9 is a variant of the amino acid sequence of SEQ ID NO: 712.
[0229] Embodiment A124 is the method of any one of the previous method or use claims, comprising a nucleic acid molecule encoding SluCas9, wherein the SluCas9 comprises an amino acid sequence selected from any one of SEQ ID NOs: 718-720.
[0230] Embodiment A125 is a method of excising a portion of an exon with a premature stop codon in a subject with Duchenne Muscular Dystrophy (DMD), the method comprising delivering to a cell a single nucleic acid molecule comprising:
   [0231] i. a nucleic acid encoding a pair of guide RNAs wherein the first guide RNA binds to a target sequence within the exon that is upstream of the premature stop codon, and wherein the second guide RNA binds to a sequence that is downstream of the premature stop codon and downstream of the sequence bound by the first guide RNA; and
   [0232] ii. a nucleic acid encoding a Staphylococcus aureus Cas9 (SaCas9);

[0233] wherein the pair of guide RNAs and SaCas9 excise a portion of the exon.
[0234] Embodiment A126 is a method of excising a portion of an exon with a premature stop codon in a subject with Duchenne Muscular Dystrophy (DMD), the method comprising delivering to a cell a single nucleic acid molecule comprising:
   [0235] i. a nucleic acid encoding a pair of guide RNAs wherein the first guide RNA binds to a target sequence within the exon that is upstream of the premature stop codon, and wherein the second guide RNA binds to a sequence that is downstream of the premature stop codon and downstream of the sequence bound by the first guide RNA; and
   [0236] ii. a nucleic acid encoding a Staphylococcus lugdunensis (SluCas9);

[0237] wherein the pair of guide RNAs and SaCas9 excise a portion of the exon.
[0238] Embodiment A127 is the method of any one of the previous method claims, comprising a single nucleic acid molecule, wherein the single nucleic acid molecule is delivered to the cell on a single vector.
[0239] Embodiment A128 is the method of any one of the previous method claims, wherein a portion of a DMD gene is excised, and wherein the portions of the gene remaining after excision are rejoined with a one-nucleotide insertion.
[0240] Embodiment A129 is the method of any one of the previous method claims, wherein a portion of a DMD gene is excised, and wherein the portions of the exon remaining after excision are rejoined without a nucleotide insertion.
[0241] Embodiment A130 is the method of any one of the previous method claims, wherein a portion of a DMD gene is excised, wherein the size of the excised portion of the gene is between 5 and 250, 5 and 200, 5 and 150, 5 and 100, 5 and 75, 5 and 50, 5 and 25, 5 and 10, 20 and 250, 20 and 200, 20 and 150, 20 and 100, 20 and 75, 20 and 50, 20 and 25, 50 and 250, 50 and 200, 50 and 150, 50 and 100, and 50 and 75 nucleotides.
[0242] Embodiment A131 is the method of any one of the previous method claims, wherein a portion of a DMD gene is excised, wherein the size of the excised portion of the exon is between 8 and 167 nucleotides.
[0243] Embodiment A132 is the method of any one of the previous method claims, wherein a portion of a DMD gene is excised, wherein the portion is within exon 43, 44, 45, 50, 51, or 53.
[0244] Embodiment A133 is the method of any one of the previous method claims, comprising a pair of guide RNAs, wherein the pair of guide RNA comprise a first and second spacer sequence selected from any one of SEQ ID NOs: 10 and 15; 10 and 16; 12 and 16; 1001 and 1005; 1001 and 15; 1001 and 16; 1003 and 1005; 16 and 1003; 12 and 1010; 12 and 1012; 12 and 1013; 10 and 1016; 1017 and 1005; 1017 and 16; 1018 and 16; 15 and 10; 16 and 10; 16 and 12; 1005 and 1001; 15 and 1001; 16 and 1001; 1005 and 1003; 1003 and 16; 1010 and 12; 1012 and 12; 1013 and 12; 1016 and 10; 1005 and 1017; 16 and 1017; and 16 and 1018.
[0245] Embodiment A134 is the method of any one of the previous method claims, comprising a pair of guide RNAs, wherein the pair of guide RNAs comprise a first and second spacer sequence selected from any one of SEQ ID NOs: 148 and 134; 149 and 135; 150 and 135; 131 and 136; 151 and 136; 139 and 131; 139 and 151; 140 and 131; 140 and 151; 141 and 148; 144 and 149; 144 and 150; 145 and 131; 145 and 151; 146 and 148; 134 and 148; 135 and 149; 135 and 150; 136 and 131; 136 and 151; 131 and 139; 151 and 139; 131 and 140; 151 and 140; 148 and 141; 149 and 144; 150 and 144; 131 and 145; 151 and 145; and 148 and 146.
[0246] Embodiment A135 is the method of any one of the previous method claims, comprising SaCas9, wherein the SaCas9 comprises the amino acid sequence of SEQ ID NO: 715.
[0247] Embodiment A136 is the composition or method of any one of the preceding claims, wherein the single nucleic acid molecule is an AAV vector, wherein the vector comprises from 5′ to 3′ with respect to the plus strand: the reverse complement of a first sgRNA scaffold sequence, the reverse complement of a nucleic acid encoding a first sgRNA guide sequence, the reverse complement of a promoter for expression of the nucleic acid encoding the first sgRNA, a promoter for expression of a nucleic acid encoding SaCas9 (e.g., CK8e), a nucleic acid encoding a SaCas9, a polyadenylation sequence, a promoter for expression of a second sgRNA in the same direction as the promoter for SaCas9, a second sgRNA guide sequence, and a second sgRNA scaffold sequence.
[0248] Embodiment A137 is the composition or method of claim 136, wherein the promoter for expression of the first sgRNA guide sequence is an hU6 promoter.
[0249] Embodiment A138 is the composition or method of any one of claims 136-137, wherein the promoter for expression of the second sgRNA guide sequence is an hU6 promoter.
[0250] Embodiment A139 is the composition or method of any one of claims 136-137, wherein the promoter for the expression of the first sgRNA guide sequence is an hU6 promoter, and the promoter for the expression of the second sgRNA guide sequence is an hU6 promoter.
[0251] Embodiment A140 is the composition or method of any one of claims 136-137, wherein the promoter for expression of the nucleic acid encoding the first sgRNA guide sequence is an 7SK promoter.
[0252] Embodiment A141 is the composition or method of any one of claims 136-137, wherein the promoter for expression of the nucleic acid encoding the second sgRNA guide sequence is an 7SK promoter.
[0253] Embodiment A142 is the composition or method of any one of claims 136-137, wherein the promoter for expression of the nucleic acid encoding the second sgRNA guide sequence is an H1m promoter.
[0254] Embodiment A143 is the composition or method of any one of the preceding claims, wherein the nucleic acid sequence encoding SaCas9 or SluCas9 is fused to a nucleic acid sequence encoding one or more nuclear localization sequences (NLSs).
[0255] Embodiment A144 is the composition or method of any one of the preceding claims, wherein the nucleic acid sequence encoding SaCas9 or SluCas9 is fused to a nucleic acid sequence encoding a nuclear localization sequence (NLS).
[0256] Embodiment A145 is the composition or method of any one of the preceding claims, wherein the nucleic acid sequence encoding SaCas9 or SluCas9 is fused to two nucleic acid sequences each encoding a nuclear localization sequence (NLS).
[0257] Embodiment A146 is the composition or method of any one of the preceding claims, wherein the nucleic acid sequence encoding SaCas9 or SluCas9 is fused to three nucleic acid sequences each encoding a nuclear localization sequence (NLS).
[0258] Embodiment A147 is the composition or method of any one of claims 143-146, wherein the one or more NLSs comprises an SV40 NLS.
[0259] Embodiment A148 is the composition or method of any one of claims 143-147, wherein the one or more NLSs comprises an c-Myc NLS.
[0260] Embodiment A149 is the composition or method of any one of claims 143-148, wherein the one or more NLSs comprises a nucleoplasmin NLS.
[0261] Embodiment A150 is the composition or method of any one of the preceding claims, wherein the nucleic acid encoding the guide RNA or the nucleic acid encoding the pair of guide RNAs comprises a sequence selected from any one of SEQ ID NOs: 600, 601, or 900-917, and wherein the composition or method comprises a nucleic acid encoding SluCas9.
[0262] Embodiment A151 is the composition or method of any one of the preceding claims, wherein the nucleic acid encoding the guide RNA or the nucleic acid encoding the pair of guide RNAs comprises a sequence selected from any one of SEQ ID NOs: 901-917, and wherein the composition or method comprises a nucleic acid encoding SluCas9.
[0263] Embodiment A152 is the composition of any one of the preceding claims, wherein the nucleic acid molecule encodes at least a first guide RNA and a second guide RNA.
[0264] Embodiment A153 is the composition of claim 152, wherein the nucleic acid molecule encodes a spacer sequence for the first guide RNA, a scaffold sequence for the first guide RNA, a spacer sequence for the second guide RNA, and a scaffold sequence for the second guide RNA.
[0265] Embodiment A154 is the composition of claim 152, wherein the spacer sequence for the first guide RNA and the spacer sequence for the second guide RNA are the same.
[0266] Embodiment A155 is the composition of claim 152, wherein the spacer sequence for the first guide RNA and the spacer sequence for the second guide RNA are different.
[0267] Embodiment A156 is the composition of any one of claims 153-155, wherein the scaffold sequence for the first guide RNA and the scaffold sequence for the second guide RNA are the same.
[0268] Embodiment A157 is the composition of any one of claims 153-154, wherein the scaffold sequence for the first guide RNA and the scaffold sequence for the second guide RNA are different.
[0269] Embodiment A158 is the composition of claim 157, wherein the scaffold sequence for the first guide RNA comprises a sequence selected from the group consisting of SEQ ID NOs: 901-916, and wherein the scaffold sequence for the second guide RNA comprises a different sequence selected from the group consisting of SEQ ID NOs: 901-916.

### DESCRIPTION OF FIGURES

[0270] FIG. 1 provides a simplified description of several representative vector configurations. Single-line arrows indicate directionality of expression of the sgRNA(s), while a double-line arrow indicates directionality of expression of the Cas9 protein. For the promoter column, representative promoters for the expression of the sgRNAs are indicated. In a particular embodiment, the Cas9 promoter may be CK8e.

[0271] FIG. 2 shows an exemplary schematic of locus-specific indel profiling, as described in Example 2, including editing categories for insertions and deletions.

[0272] FIGS. 3A-3B show the editing frequency and indel profile of selected SluCas9 and SaCas9 sgRNAs that target exon 45 of the DMD gene in human HEK293FT cells (FIG. 3A) and mouse Neuro-2a cells (FIG. 3B). A high-performing sgRNA for SpCas9 was included as reference (E45Sp52). Each bar represents a sgRNA and the bar height depicts the average total indel frequency. Indel profiles are shown for each sgRNA as follows: solid black (1-nucleotide (nt) insertion leading to reframe, sometimes referred to as “RF.+1”); solid white (indels other than 1-nt insertion leading to reframe, sometimes referred to as “RF.Other”); checkerboard pattern (indels that disrupt the ±6=nt window of the exon/intron boundaries, referred to as “Exon skipping”); diagonal lines (other indels, sometimes referred to as “OE”). Data are the average of 3 replicates.

[0273] FIGS. 4A-4B show the editing frequency and indel profile of selected SluCas9 and SaCas9 sgRNAs that target exon 51 of the DMD gene in human HEK293FT cells (FIG. 4A) and mouse Neuro-2a cells (FIG. 4B). A high performing sgRNA for SpCas9 was included as reference (E51Sp32). Each bar represents a sgRNA and the bar height depicts the average total indel frequency. Indel profiles are shown for each sgRNA as follows: solid black (1-nucleotide (nt) insertion leading to reframe, referred to as “RF.+1”); solid white (indels other than 1-nt insertion leading to reframe, referred to as “RF.Other”); checkerboard pattern (indels that disrupt the ±6=nt window of the exon/intron boundaries, referred to as “Exon skipping”); diagonal lines (other indels, sometimes referred to as “OE” or “Other indel”). Data are the average of 3 replicates.

[0274] FIGS. 5A-5B show the editing frequency and indel profile of selected SluCas9 and SaCas9 sgRNAs within exon 53 of the DMD gene in human HEK293FT cells (FIG. 5A) and mouse Neuro-2a cells (FIG. 5B). A high performing sgRNA for SpCas9 was included as reference (E53Sp63). Each bar represents a sgRNA and the bar height depicts the average total indel frequency. Indel profiles are shown for each sgRNA using distinct colors as follows: solid black (1-nucleotide (nt) insertion leading to reframe, referred to as “RF.+1”); solid white (indels other than 1-nt insertion leading to reframe, referred to as “RF.Other”); checkerboard pattern (indels that disrupt the ±6=nt window of the exon/intron boundaries, referred to as “Exon skipping”); diagonal lines (other indels, referred to as “OE” or “Other indel”). Data are the average of 3 replicates.

[0275] FIGS. 6A-D show editing frequency and indel profile of selected SaCas9-KKH and SluCas9 sgRNA pairs within exon 45 in HEK293FT cells (FIG. 6B) and Neuro-2a cells (FIG. 6D). FIG. 6A shows a schematic of editing. A single cut sgRNA for SaCas9 (SaCas9-4) was included as reference (FIG. 6C). Each bar represents a sgRNA and the bar height depicts the average total indel frequency. Indel profiles are shown for each sgRNA using distinct patterns. Error bar=upper limit of SEM for each indel group.

[0276] FIG. 7A shows the nucleotide composition and RNA secondary structure of the stem-loop I in different SluCas9 single-guide RNA scaffolds. Key differences in the sequence and secondary structure between Slu-VCGT-4.5, Slu-VCGT-4 and Slu-VCGT-5 are depicted. Squares and triangles show the difference in the secondary structure in the upper stem. Diamond and pentagon shapes show the single nucleotide change in the bottom stem.

[0277] FIG. 7B is a histogram showing the percentage of different types of indels generated by two SluCas9 sgRNA candidates: SluCas9-23 and SluCas9-24. For each guide RNA, three scaffolds were tested, including Slu-VCGT-4.5, Slu-VCGT-4 and Slu-VCGT-5. Each sgRNA was tested at three different RNP doses. The exact amounts of SluCas9 protein and sgRNA tested were: 6.75 pmol:37.5 pmol for low dose, 12.5 pmol:75 pmol for middle dose, and 25 pmol:150 pmol for high dose. The different colors of the bars in the histogram represent different types of indels generated by sgRNAs. Black represents the percentage of +1 bp insertions. White represents the percentage of other insertions and deletions that have the potential to restore the reading frame of particular DMD patient mutations of interest. These are referred to as “RF other”, which represents the sum of 2, 5, 8, 11 bp deletions within the alignment window of −20 bp to +20 bp around the Cas9 cut site. The remaining indels shown in pattern are classified as “Other indels”.

[0278] FIG. 8 shows editing frequency and indel profile of selected SluCas9 sgRNA pairs within exon 45 in primary human skeletal muscle myoblasts (HsMMs). Two single cut sgRNAs for SpCas9 (EX-145, E45Sp52) and SluCas9 (SluCas9-24) were included as reference. Each bar represents a sgRNA or a sgRNA pair and the bar height depicts the average total indel frequency. Indel profiles are shown using distinct patterns. Error bar=upper limit of SD for each indel group.

[0279] FIGS. 9A and 9B show editing frequency and indel profile of selected SaCas9-KKH and SluCas9 sgRNA pairs within exon 51 in HEK293FT cells. Each bar represents a sgRNA or a sgRNA pair and the bar height depicts the average total indel frequency. Indel profiles are shown using distinct patterns. Error bar=upper limit of SD for each indel group.

[0280] FIGS. 10A and 10B show editing frequency and indel profile of selected AAV vectors in C2C12 myotubes. Three test guides are shown for FIG. 10A and 4 test guides for FIG. 10B. Each bar represents a different AAV configuration and the bar height depicts the average total indel frequency. Indel profiles are shown using distinct patterns. Error bar=upper limit of SD for each indel group.

[0281] FIG. 11 shows vector genome quantitation of selected AAV vectors in C2C12 myotubes. Each bar represents a different AAV configuration and the bar height depicts the average vector genome copy number per μg DNA. Error bar=upper limit of SD.

[0282] FIGS. 12A and 12B show transgene expression of selected AAV vectors in C2C12 myotubes. FIG. 12A: each bar represents a different AAV configuration and the bar height depicts the average Cas9 transgene copy per ug RNA. Cas9 nucleases are shown using distinct patterns. FIG. 12B: each bar represents a different sgRNA and the bar height depicts the average sgRNA transgene copy per ug RNA. Promoter combinations are shown using distinct patterns. Error bar=upper limit of SD.

[0283] FIG. 13 shows Cas9 localization of selected AAV vectors in C2C12 myotubes. In FIG. 13 and throughout the application, single-line arrows indicate directionality of expression of the sgRNA(s), while a double-line or “thick” arrow (with or without an embedded “X”) indicates directionality of expression of the Cas9 protein. SluCas9's location is shown in the bottom panel of each; MYOG is shown with representative arrows, DAPI is shown with representative bold, larger arrows. Image shown at 20-25 μm scale.

[0284] FIGS. 14A and 14B show editing frequency and indel profile of selected AAV vectors in heart (FIG. 14A) and quadriceps (FIG. 14B) of dEx44 mouse model. Each bar represents a different AAV configuration and the bar height depicts the average total indel frequency. Indel profiles are shown using distinct patterns. Error bar=upper limit of SD for each indel group.

[0285] FIGS. 15A and 15B show dystrophin restoration of selected AAV vectors in heart (FIG. 15A) and quadriceps (FIG. 15B) of dEx44 mouse model. Each group represents a different AAV configuration and the horizontal bar depicts the average total dystrophin protein level.

[0286] FIGS. 16A and 16B show vector genome quantitation of selected AAV vectors in heart (FIG. 16A) and quadriceps (FIG. 16B) of dEx44 mouse model. Each group represents a different AAV configuration and the horizontal bar depicts the average vector genome copy number per ug DNA.

[0287] FIGS. 17A and 17B show Cas9 and sgRNA transgene expression of selected AAV vectors in heart (FIG. 17A) and quadriceps (FIG. 17B) of dEx44 mouse model. Each group represents a different AAV configuration and the horizontal bar depicts the average transgene copy number per ug RNA. Closed circles indicate Cas9 mRNA expression and open circles indicate sgRNA expression.

[0288] FIGS. 18A-18C show editing frequency and indel profile of selected Cas12i2 guide RNAs used with Cas12i2 endonuclease in exon 45 in HEK293FT cells. FIG. 18A shows a schematic of the experiment, FIG. 18B shows indel frequency for selected pairs of guide RNAs, and FIG. 18C shows a single cut sgRNA for SaCas9 (SaCas9-4) and for SluCas9 (SluCas9-24) for reference.

### DETAILED DESCRIPTION

[0289] Reference will now be made in detail to certain embodiments of the invention, examples of which are illustrated in the accompanying drawings. While the invention is described in conjunction with the illustrated embodiments, it will be understood that they are not intended to limit the invention to those embodiments. On the contrary, the invention is intended to cover all alternatives, modifications, and equivalents, which may be included within the invention as defined by the appended claims and included embodiments.

[0290] Before describing the present teachings in detail, it is to be understood that the disclosure is not limited to specific compositions or process steps, as such may vary. It should be noted that, as used in this specification and the appended claims, the singular form “a”, “an” and “the” include plural references unless the context clearly dictates otherwise. Thus, for example, reference to “a guide” includes a plurality of guides and reference to “a cell” includes a plurality of cells and the like.

[0291] Numeric ranges are inclusive of the numbers defining the range. Measured and measurable values are understood to be approximate, taking into account significant digits and the error associated with the measurement. Also, the use of “comprise”, “comprises”, “comprising”, “contain”, “contains”, “containing”, “include”, “includes”, and “including” are not intended to be limiting. It is to be understood that both the foregoing general description and detailed description are exemplary and explanatory only and are not restrictive of the teachings.

[0292] Unless specifically noted in the specification, embodiments in the specification that recite “comprising” various components are also contemplated as “consisting of” or “consisting essentially of” the recited components; embodiments in the specification that recite “consisting of” various components are also contemplated as “comprising” or “consisting essentially of” the recited components; and embodiments in the specification that recite “consisting essentially of” various components are also contemplated as “consisting of” or “comprising” the recited components (this interchangeability does not apply to the use of these terms in the claims). The term “or” is used in an inclusive sense, i.e., equivalent to “and/or,” unless the context clearly indicates otherwise.

[0293] The section headings used herein are for organizational purposes only and are not to be construed as limiting the desired subject matter in any way. In the event that any material incorporated by reference contradicts any term defined in this specification or any other express content of this specification, this specification controls. While the present teachings are described in conjunction with various embodiments, it is not intended that the present teachings be limited to such embodiments. On the contrary, the present teachings encompass various alternatives, modifications, and equivalents, as will be appreciated by those of skill in the art.

### I. Definitions

[0294] Unless stated otherwise, the following terms and phrases as used herein are intended to have the following meanings:

[0295] “Polynucleotide,” “nucleic acid,” and “nucleic acid molecule,” are used herein to refer to a multimeric compound comprising nucleosides or nucleoside analogs which have nitrogenous heterocyclic bases or base analogs linked together along a backbone, including conventional RNA, DNA, mixed RNA-DNA, and polymers that are analogs thereof. A nucleic acid “backbone” can be made up of a variety of linkages, including one or more of sugar-phosphodiester linkages, peptide-nucleic acid bonds (“peptide nucleic acids” or PNA; PCT No. WO 95/32305), phosphorothioate linkages, methylphosphonate linkages, or combinations thereof. Sugar moieties of a nucleic acid can be ribose, deoxyribose, or similar compounds with substitutions, e.g., 2′ methoxy or 2′ halide substitutions. Nitrogenous bases can be conventional bases (A, G, C, T, U), analogs thereof (e.g., modified uridines such as 5-methoxyuridine, pseudouridine, or N1-methylpseudouridine, or others); inosine; derivatives of purines or pyrimidines (e.g., N⁴-methyl deoxyguanosine, deaza- or aza-purines, deaza- or aza-pyrimidines, pyrimidine bases with substituent groups at the 5 or 6 position (e.g., 5-methylcytosine), purine bases with a substituent at the 2, 6, or 8 positions, 2-amino-6-methylaminopurine, O⁶-methylguanine, 4-thio-pyrimidines, 4-amino-pyrimidines, 4-dimethylhydrazine-pyrimidines, and O⁴-alkyl-pyrimidines; U.S. Pat. No. 5,378,825 and PCT No. WO 93/13121). For general discussion see The Biochemistry of the Nucleic Acids 5-36, Adams et al., ed., 11^{th} ed., 1992). Nucleic acids can include one or more “abasic” residues where the backbone includes no nitrogenous base for position(s) of the polymer (U.S. Pat. No. 5,585,481). A nucleic acid can comprise only conventional RNA or DNA sugars, bases and linkages, or can include both conventional components and substitutions (e.g., conventional bases with 2′ methoxy linkages, or polymers containing both conventional bases and one or more base analogs). Nucleic acid includes “locked nucleic acid” (LNA), an analogue containing one or more LNA nucleotide monomers with a bicyclic furanose unit locked in an RNA mimicking sugar conformation, which enhance hybridization affinity toward complementary RNA and DNA sequences (Vester and Wengel, 2004, Biochemistry 43(42):13233-41). RNA and DNA have different sugar moieties and can differ by the presence of uracil or analogs thereof in RNA and thymine or analogs thereof in DNA.

[0296] “Guide RNA”, “guide RNA”, and simply “guide” are used herein interchangeably to refer to either a crRNA (also known as CRISPR RNA), or the combination of a crRNA and a trRNA (also known as tracrRNA). The crRNA and trRNA may be associated as a single RNA molecule (single guide RNA, sgRNA) or in two separate RNA molecules (dual guide RNA, dgRNA). “Guide RNA” or “guide RNA” refers to each type. The trRNA may be a naturally-occurring sequence, or a trRNA sequence with modifications or variations compared to naturally-occurring sequences. For clarity, the terms “guide RNA” or “guide” as used herein, and unless specifically stated otherwise, may refer to an RNA molecule (comprising A, C, G, and U nucleotides) or to a DNA molecule encoding such an RNA molecule (comprising A, C, G, and T nucleotides) or complementary sequences thereof. In general, in the case of a DNA nucleic acid construct encoding a guide RNA, the U residues in any of the RNA sequences described herein may be replaced with T residues, and in the case of a guide RNA construct encoded by any of the DNA sequences described herein, the T residues may be replaced with U residues.

[0297] As used herein, a “spacer sequence,” sometimes also referred to herein and in the literature as a “spacer,” “protospacer,” “guide sequence,” or “targeting sequence” refers to a sequence within a guide RNA that is complementary to a target sequence and functions to direct a guide RNA to a target sequence for cleavage by a Cas9. A guide sequence can be 24, 23, 22, 21, 20 or fewer base pairs in length, e.g., in the case of Staphylococcus lugdunensis (i.e., SluCas9) or Staphylococcus aureus (i.e., SaCas9) and related Cas9 homologs/orthologs. In preferred embodiments, a guide/spacer sequence in the case of SluCas9 or SaCas9 is at least 20 base pairs in length, or more specifically, within 20-25 base pairs in length (see, e.g., Schmidt et al., 2021, Nature Communications, “Improved CRISPR genome editing using small highly active and specific engineered RNA-guided nucleases”). Shorter or longer sequences can also be used as guides, e.g., 15-, 16-, 17-, 18-, 19-, 20-, 21-, 22-, 23-, 24-, or 25-nucleotides in length. For example, in some embodiments, the guide sequence comprises at least 17, 18, 19, 20, 21, 22, 23, 24, or 25 contiguous nucleotides of a sequence selected from SEQ ID NOs: 1-35 (for SaCas9), and 100-225 (for SluCas9). In some embodiments, the guide sequence comprises a sequence selected from SEQ ID NOs: 1-35, 100-225, 1000-1078, 2000-2116, 3000-3069, or 4000-4251. In some embodiments, the target sequence is in a gene or on a chromosome, for example, and is complementary to the guide sequence. In some embodiments, the degree of complementarity or identity between a guide sequence and its corresponding target sequence may be about 75%, 80%, 85%, 90%, 95%, 96%, 97%, 98%, 99%, or 100%. For example, in some embodiments, the guide sequence comprises a sequence with about 75%, 80%, 85%, 90%, 95%, 96%, 97%, 98%, 99%, or 100% identity to at least 17, 18, 19, 20, 21, 22, 23, 24, or 25 contiguous nucleotides of a sequence selected from SEQ ID NOs: 1-35, 100-225, 1000-1078, 2000-2116, 3000-3069, or 4000-4251. In some embodiments, the guide sequence comprises a sequence with about 75%, 80%, 85%, 90%, 95%, 96%, 97%, 98%, 99%, or 100% identity to a sequence selected from SEQ ID NOs: 1-35, 100-225, 1000-1078, 2000-2116, 3000-3069, or 4000-4251. In some embodiments, the guide sequence and the target region may be 100% complementary or identical. In other embodiments, the guide sequence and the target region may contain at least one mismatch. For example, the guide sequence and the target sequence may contain 1, 2, 3, or 4 mismatches, where the total length of the target sequence is at least 17, 18, 19, 20 or more base pairs. In some embodiments, the guide sequence and the target region may contain 1-4 mismatches where the guide sequence comprises at least 17, 18, 19, 20 or more nucleotides. In some embodiments, the guide sequence and the target region may contain 1, 2, 3, or 4 mismatches where the guide sequence comprises 20 nucleotides. In some embodiments, the guide sequence and the target region do not contain any mismatches.

[0298] In some embodiments, the guide sequence comprises a sequence selected from SEQ ID NOs: 1-35, 100-225, 1000-1078, 2000-2116, 3000-3069, or 4000-4251, wherein if the 5′ terminal nucleotide is not guanine, one or more guanine (g) is added to the sequence at its 5′ end. The 5′ g or gg is required in some instances for transcription, for example, for expression by the RNA polymerase III-dependent U6 promoter or the T7 promoter. In some embodiments, a 5′ guanine is added to any one of the guide sequences or pairs of guide sequences disclosed herein.

[0299] Target sequences for Cas9s include both the positive and negative strands of genomic DNA (i.e., the sequence given and the sequence's reverse compliment), as a nucleic acid substrate for a Cas9 is a double stranded nucleic acid. Accordingly, where a guide sequence is said to be “complementary to a target sequence”, it is to be understood that the guide sequence may direct a guide RNA to bind to the reverse complement of a target sequence. Thus, in some embodiments, where the guide sequence binds the reverse complement of a target sequence, the guide sequence is identical to certain nucleotides of the target sequence (e.g., the target sequence not including the PAM) except for the substitution of U for T in the guide sequence.

[0300] As used herein, “ribonucleoprotein” (RNP) or “RNP complex” refers to a guide RNA together with a Cas9. In some embodiments, the guide RNA guides the Cas9 such as Cas9 to a target sequence, and the guide RNA hybridizes with and the agent binds to the target sequence, which can be followed by cleaving or nicking (in the context of a modified “nickase” Cas9).

[0301] As used herein, a first sequence is considered to “comprise a sequence with at least X % identity to” a second sequence if an alignment of the first sequence to the second sequence shows that X % or more of the positions of the second sequence in its entirety are matched by the first sequence. For example, the sequence AAGA comprises a sequence with 100% identity to the sequence AAG because an alignment would give 100% identity in that there are matches to all three positions of the second sequence. The differences between RNA and DNA (generally the exchange of uridine for thymidine or vice versa) and the presence of nucleoside analogs such as modified uridines do not contribute to differences in identity or complementarity among polynucleotides as long as the relevant nucleotides (such as thymidine, uridine, or modified uridine) have the same complement (e.g., adenosine for all of thymidine, uridine, or modified uridine; another example is cytosine and 5-methylcytosine, both of which have guanosine or modified guanosine as a complement). Thus, for example, the sequence 5′-AXG where X is any modified uridine, such as pseudouridine, N1-methyl pseudouridine, or 5-methoxyuridine, is considered 100% identical to AUG in that both are perfectly complementary to the same sequence (5′-CAU). Exemplary alignment algorithms are the Smith-Waterman and Needleman-Wunsch algorithms, which are well-known in the art. One skilled in the art will understand what choice of algorithm and parameter settings are appropriate for a given pair of sequences to be aligned; for sequences of generally similar length and expected identity >50% for amino acids or >75% for nucleotides, the Needleman-Wunsch algorithm with default settings of the Needleman-Wunsch algorithm interface provided by the EBI at the www.ebi.ac.uk web server is generally appropriate.

[0302] “mRNA” is used herein to refer to a polynucleotide that is not DNA and comprises an open reading frame that can be translated into a polypeptide (i.e., can serve as a substrate for translation by a ribosome and amino-acylated tRNAs). mRNA can comprise a phosphate-sugar backbone including ribose residues or analogs thereof, e.g., 2′-methoxy ribose residues. In some embodiments, the sugars of an mRNA phosphate-sugar backbone consist essentially of ribose residues, 2′-methoxy ribose residues, or a combination thereof.

[0303] Guide sequences useful in the guide RNA compositions and methods described herein are shown, for example, in Table 1A, Table 1B, and Table 5 and throughout the specification.

[0304] As used herein, a “target sequence” refers to a sequence of nucleic acid in a target gene that has complementarity to at least a portion of the guide sequence of the guide RNA. The interaction of the target sequence and the guide sequence directs a Cas9 to bind, and potentially nick or cleave (depending on the activity of the agent), within the target sequence.

[0305] As used herein, “treatment” refers to any administration or application of a therapeutic for disease or disorder in a subject, and includes inhibiting the disease or development of the disease (which may occur before or after the disease is formally diagnosed, e.g., in cases where a subject has a genotype that has the potential or is likely to result in development of the disease), arresting its development, relieving one or more symptoms of the disease, curing the disease, or preventing reoccurrence of one or more symptoms of the disease. For example, treatment of DMD may comprise alleviating symptoms of DMD.

[0306] As used herein, “ameliorating” refers to any beneficial effect on a phenotype or symptom, such as reducing its severity, slowing or delaying its development, arresting its development, or partially or completely reversing or eliminating it. In the case of quantitative phenotypes such as expression levels, ameliorating encompasses changing the expression level so that it is closer to the expression level seen in healthy or unaffected cells or individuals.

[0307] A “pharmaceutically acceptable excipient” refers to an agent that is included in a pharmaceutical formulation that is not the active ingredient. Pharmaceutically acceptable excipients may e.g., aid in drug delivery or support or enhance stability or bioavailability.

[0308] The term “about” or “approximately” means an acceptable error for a particular value as determined by one of ordinary skill in the art, which depends in part on how the value is measured or determined.

[0309] As used herein, “Staphylococcus aureus Cas9” may also be referred to as SaCas9, and includes wild type SaCas9 (e.g., SEQ ID NO: 711) and variants thereof. A variant of SaCas9 comprises one or more amino acid changes as compared to SEQ ID NO: 711, including insertion, deletion, or substitution of one or more amino acids, or a chemical modification to one or more amino acids.

[0310] As used herein, “Staphylococcus lugdunensis Cas9” may also be referred to as SluCas9, and includes wild type SluCas9 (e.g., SEQ ID NO: 712) and variants thereof. A variant of SluCas9 comprises one or more amino acid changes as compared to SEQ ID NO: 712, including insertion, deletion, or substitution of one or more amino acids, or a chemical modification to one or more amino acids.

### II. Compositions

[0311] Provided herein are compositions useful for treating Duchenne Muscular Dystrophy (DMD), e.g., using a single or multiple (e.g., at least 2) nucleic acid molecule encoding 1) one or more guide RNAs comprising one or more guide sequences of Table 1A, Table 1B, or Table 5; and 2) SaCas9 (for SEQ ID NOs: 1-35, 1000-1078 or 3000-3069) or SluCas9 (for SEQ ID NOs: 100-225, 2000-2116, or 4000-4251). Such compositions may be administered to subjects having or suspected of having DMD.

[0312] In some embodiments, a composition is provided comprising, consisting of, or consisting essentially of a single nucleic acid molecule comprising: i) a nucleic acid encoding Staphylococcus aureus Cas9 (SaCas9) or Staphylococcus lugdunensis (SluCas9) and at least one, at least two, or at least three guide RNAs; or ii) a nucleic acid encoding Staphylococcus aureus Cas9 (SaCas9) or Staphylococcus lugdunensis (SluCas9) and from one to n guide RNAs, wherein n is no more than the maximum number of guide RNAs that can be expressed from said nucleic acid; or iii) a nucleic acid encoding Staphylococcus aureus Cas9 (SaCas9) or Staphylococcus lugdunensis (SluCas9) and one to three guide RNAs.

[0313] In some embodiments, a composition is provided comprising, consisting of, or consisting essentially of at least two nucleic acid molecules comprising a first nucleic acid encoding Staphylococcus aureus Cas9 (SaCas9) or Staphylococcus lugdunensis (SluCas9); and a second nucleic acid that does not encode a SaCas9 or SluCas9 and encodes any one of i) at least one, at least two, at least three, at least four, at least five, or at least six guide RNAs; or ii) from one to n guide RNAs, wherein n is no more than the maximum number of guide RNAs that can be expressed from said nucleic acid; or iii) from one to six guide RNAs.

[0314] In some embodiments, a composition is provided comprising, consisting of, or consisting essentially of at least two nucleic acid molecules comprising a first nucleic acid encoding Staphylococcus aureus Cas9 (SaCas9) or Staphylococcus lugdunensis (SluCas9) and i) at least one, at least two, or at least three guide RNAs; or ii) from one to n guide RNAs, wherein n is no more than the maximum number of guide RNAs that can be expressed from said nucleic acid; or iii) one to three guide RNAs; and a second nucleic acid that does not encode a SaCas9 or SluCas9, optionally wherein the second nucleic acid comprises any one of i) at least one, at least two, at least three, at least four, at least five, or at least six guide RNAs; or ii) from one to n guide RNAs, wherein n is no more than the maximum number of guide RNAs that can be expressed from said nucleic acid; or iii) from one to six guide RNAs.

[0315] In some embodiments, a composition is provided comprising, consisting of, or consisting essentially of at least two nucleic acid molecules comprising a first nucleic acid encoding Staphylococcus aureus Cas9 (SaCas9) or Staphylococcus lugdunensis (SluCas9) and at least one, at least two, or at least three guide RNAs; and a second nucleic acid that does not encode a SaCas9 or SluCas9 and encodes from one to six guide RNAs.

[0316] In some embodiments, a composition is provided comprising, consisting of, or consisting essentially of at least two nucleic acid molecules comprising a first nucleic acid encoding Staphylococcus aureus Cas9 (SaCas9) or Staphylococcus lugdunensis (SluCas9) and at least two guide RNAs, wherein at least one guide RNA binds upstream of sequence to be excised and at least one guide RNA binds downstream of sequence to be excised; and a second nucleic acid that does not encode a SaCas9 or SluCas9 and encodes at least one additional copy of the guide RNAs encoded in the first nucleic acid. In some embodiments, the guide RNA excises a portion of a DMD gene, optionally an exon, intron, or exon/intron junction.

[0317] In some embodiments, a composition is provided comprising, consisting of, or consisting essentially of at least two nucleic acid molecules comprising a first nucleic acid encoding Staphylococcus aureus Cas9 (SaCas9) or Staphylococcus lugdunensis (SluCas9) and a first and a second guide RNA that function to excise a portion of a DMD gene; and a second nucleic acid encoding at least 2 or at least 3 copies of the first guide RNA and at least 2 or at least 3 copies of the second guide RNA.

[0318] In some embodiments, a composition is provided comprising, consisting of, or consisting essentially of one or more nucleic acid molecules encoding an endonuclease and a pair of guide RNAs, wherein each guide RNA targets a different sequence in a DMD gene, wherein the endonuclease and pair of guide RNAs are capable of excising a target sequence in DNA that is between 5-250 nucleotides in length. In some embodiments, the endonuclease is a class 2, type II Cas endonuclease. In some embodiments, the class 2, type II Cas endonuclease is SpCas9, SaCas9, or SluCas9. In some embodiments, the endonuclease is not a class 2, type V Cas endonuclease. In some embodiments, the excised target sequence comprises a splice acceptor site or a splice donor site. In some embodiments, the excised target sequence comprises a premature stop codon in the DMD gene. In some embodiments, the excised target sequence does not comprise an entire exon of the DMD gene. In some embodiments, any of the methods and/or ribonucleoprotein complexes disclosed herein do not destroy/specifically alter the sequence of a splice acceptor site, splice donor site, or premature stop codon site.

[0319] In some embodiments, the guide RNA in the composition comprises any one of the following:
[0320] a. when SaCas9 is used, one or more spacer sequences selected from any one of SEQ ID NOs: 1-35, 1000-1078, and 3000-3069; or
[0321] b. when SluCas9a is used, one or more spacer sequences selected from any one of SEQ ID NOs: 100-225, 2000-2116, and 4000-4251; or
[0322] c. when SaCas9 is used, one or more spacer sequences comprising at least 17, 18, 19, or 20 contiguous nucleotides of a spacer sequence selected from any one of SEQ ID NOs: 1-35, 1000-1078, and 3000-3069; or
[0323] d. when SluCas9a is used, one or more spacer sequences comprising at least 17, 18, 19, or 20 contiguous nucleotides of a spacer sequence selected from any one of SEQ ID NOs: 100-225, 2000-2116, and 4000-4251; or
[0324] e. when SaCas9 is used, one or more spacer sequences that is at least 90% identical to any one of SEQ ID NOs: 1-35, 1000-1078, and 3000-3069; or
[0325] f. when SluCas9a is used, one or more spacer sequences that is at least 90% identical to any one of SEQ ID NOs: 100-225, 2000-2116, and 4000-4251; or
[0326] g. when SaCas9 is used with at least two guide RNAs, a first and second spacer sequence selected from any one of SEQ ID NOs: 10 and 15; 10 and 16; 12 and 16; 1001 and 1005; 1001 and 15; 1001 and 16; 1003 and 1005; 16 and 1003; 12 and 1010; 12 and 1012; 12 and 1013; 10 and 1016; 1017 and 1005; 1017 and 16; 1018 and 16; 15 and 10; 16 and 10; 16 and 12; 1005 and 1001; 15 and 1001; 16 and 1001; 1005 and 1003; 1003 and 16; 1010 and 12; 1012 and 12; 1013 and 12; 1016 and 10; 1005 and 1017; 16 and 1017; and 16 and 1018; or
[0327] h. when SaCas9 is used with at least two guide RNAs, at least 17, 18, 19, 20, or 21 contiguous nucleotides of a first and second spacer sequence selected from any one of SEQ ID NOs: 10 and 15; 10 and 16; 12 and 16; 1001 and 1005; 1001 and 15; 1001 and 16; 1003 and 1005; 16 and 1003; 12 and 1010; 12 and 1012; 12 and 1013; 10 and 1016; 1017 and 1005; 1017 and 16; 1018 and 16; 15 and 10; 16 and 10; 16 and 12; 1005 and 1001; 15 and 1001; 16 and 1001; 1005 and 1003; 1003 and 16; 1010 and 12; 1012 and 12; 1013 and 12; 1016 and 10; 1005 and 1017; 16 and 1017; and 16 and 1018; or
[0328] i. when SaCas9 is used with at least two guide RNAs, at least 90% identical to a first and second spacer sequence selected from any one of SEQ ID NOs: 10 and 15; 10 and 16; 12 and 16; 1001 and 1005; 1001 and 15; 1001 and 16; 1003 and 1005; 16 and 1003; 12 and 1010; 12 and 1012; 12 and 1013; 10 and 1016; 1017 and 1005; 1017 and 16; 1018 and 16; 15 and 10; 16 and 10; 16 and 12; 1005 and 1001; 15 and 1001; 16 and 1001; 1005 and 1003; 1003 and 16; 1010 and 12; 1012 and 12; 1013 and 12; 1016 and 10; 1005 and 1017; 16 and 1017; and 16 and 1018; or
[0329] j. when SluCas9 is used with at least two guide RNAs, a first and second spacer sequence selected from any one of SEQ ID NOs: 148 and 134; 149 and 135; 150 and 135; 131 and 136; 151 and 136; 139 and 131; 139 and 151; 140 and 131; 140 and 151; 141 and 148; 144 and 149; 144 and 150; 145 and 131; 145 and 151; 146 and 148; 134 and 148; 135 and 149; 135 and 150; 136 and 131; 136 and 151; 131 and 139; 151 and 139; 131 and 140; 151 and 140; 148 and 141; 149 and 144; 150 and 144; 131 and 145; 151 and 145; and 148 and 146; or
[0330] k. when SluCas9 is used with at least two guide RNAs, at least 17, 18, 19, 20, or 21 contiguous nucleotides of a first and second spacer sequence selected from any one of SEQ ID NOs: 148 and 134; 149 and 135; 150 and 135; 131 and 136; 151 and 136; 139 and 131; 139 and 151; 140 and 131; 140 and 151; 141 and 148; 144 and 149; 144 and 150; 145 and 131; 145 and 151; 146 and 148; 134 and 148; 135 and 149; 135 and 150; 136 and 131; 136 and 151; 131 and 139; 151 and 139; 131 and 140; 151 and 140; 148 and 141; 149 and 144; 150 and 144; 131 and 145; 151 and 145; and 148 and 146; or
[0331] l. when SluCas9 is used with at least two guide RNAs, at least 90% identical to a first and second spacer sequence selected from any one of SEQ ID NOs: 148 and 134; 149 and 135; 150 and 135; 131 and 136; 151 and 136; 139 and 131; 139 and 151; 140 and 131; 140 and 151; 141 and 148; 144 and 149; 144 and 150; 145 and 131; 145 and 151; 146 and 148; 134 and 148; 135 and 149; 135 and 150; 136 and 131; 136 and 151; 131 and 139; 151 and 139; 131 and 140; 151 and 140; 148 and 141; 149 and 144; 150 and 144; 131 and 145; 151 and 145; and 148 and 146; or
[0332] m. when SluCas9 is used with at least two guide RNAs, at least 90% identical to a first and second spacer sequence selected from any one of:
   [0333] i. SEQ ID NOS: 148 and 134,
   [0334] ii. SEQ ID Nos: 145 and 131,
   [0335] iii. SEQ ID Nos: 144 and 149;
   [0336] iv. SEQ ID Nos: 144 and 150; and
   [0337] v. SEQ ID Nos: 146 and 148; or
[0338] n. when SaCas9 is used with at least two guide RNAs, at least 90% identical to a first and second spacer sequence selected from any one of:
   [0339] i. SEQ ID NOs: 12 and 1013; and
   [0340] ii. SEQ ID Nos: 12 and 1016.

[0341] In some embodiments, the disclosure provides for a composition comprising: a) one or more nucleic acid molecules encoding a SluCas9 and b) a first spacer sequence and a second spacer sequence selected from SEQ ID Nos: 148 and 134. In some embodiments, the composition comprises: a) one or more nucleic acid molecules encoding a SluCas9 and b) a first spacer sequence and a second spacer sequence selected from SEQ ID Nos: 145 and 131. In some embodiments, the composition comprises: a) one or more nucleic acid molecules encoding a SluCas9 and b) a first spacer sequence and a second spacer sequence selected from SEQ ID Nos: 144 and 149. In some embodiments, the composition comprises: a) one or more nucleic acid molecules encoding a SluCas9 and b) a first spacer sequence and a second spacer sequence selected from SEQ ID Nos: 144 and 150. In some embodiments, the composition comprises: a) one or more nucleic acid molecules encoding a SluCas9 and b) a first spacer sequence and a second spacer sequence selected from SEQ ID Nos: 146 and 148. In some embodiments, the composition comprises: a) one or more nucleic acid molecules encoding a SaCas9 (e.g., an SaCas9-KKH) and b) a first spacer sequence and a second spacer sequence selected from SEQ ID Nos: 12 and 1013. In some embodiments, the composition comprises: a) one or more nucleic acid molecules encoding a SaCas9 (e.g., an SaCas9-KKH) and b) a first spacer sequence and a second spacer sequence selected from SEQ ID Nos: 12 and 1016.

[0342] In some embodiments, the one or more guide RNAs direct the Cas9 to a site in or near any one of exon 43, 44, 45, 50, 51, or 53 of dystrophin. For example, the Cas9 may be directed to cut within 10, 20, 30, 40, or 50 nucleotides of a target sequence.

[0343] The disclosure herein may reference a “first and a second spacer” or a “first and a second guide RNA, gRNA, or sgRNA” followed by one or more pairs of specific sequences. It should be noted that the order of the sequences in the pair is not intended to be restricted to the order in which they are presented. For example, the phrase “the first sgRNA and the second sgRNA comprise the sequences of SEQ ID NOs: 10 and 15” could mean that the first sgRNA comprises the sequence of SEQ ID NO: 10 and the second sgRNA sequence comprises the sequence of SEQ ID NO: 15, or this phrase could mean that the first sgRNA comprises the sequence of SEQ ID NO: 15 and the second sgRNA sequence comprises the sequence of SEQ ID NO: 10.

[0344] In some embodiments, a composition comprising a single nucleic acid molecule encoding one or more guide RNAs and a Cas9 is provided, wherein the single nucleic acid molecule comprises:
[0345] a. a first nucleic acid encoding one or more spacer sequences selected from any one of SEQ ID NOs: 1-35, 1000-1078, or 3000-3069 and a second nucleic acid encoding a Staphylococcus aureus Cas9 (SaCas9);
[0346] b. a first nucleic acid encoding one or more spacer sequences selected from any one of SEQ ID NOs: 100-225, 2000-2116, or 4000-4251 and a second nucleic acid encoding a Staphylococcus lugdunensis (SluCas9);
[0347] c. a first nucleic acid encoding one or more spacer sequences comprising at least 17, 18, 19, or 20 contiguous nucleotides of a spacer sequence selected from any one of SEQ ID NOs: 1-35, 1000-1078, or 3000-3069 and a second nucleic acid encoding a Staphylococcus aureus Cas9 (SaCas9);
[0348] d. a first nucleic acid encoding one or more spacer sequences comprising at least 17, 18, 19, or 20 contiguous nucleotides of a spacer sequence selected from any one of SEQ ID NOs: 100-225, 2000-2116, or 4000-4251 and a second nucleic acid encoding a Staphylococcus lugdunensis (SluCas9);
[0349] e. a first nucleic acid encoding one or more spacer sequences that is at least 90% identical to any one of SEQ ID NOs: 1-35, 1000-1078, or 3000-3069 and a second nucleic acid encoding a Staphylococcus aureus Cas9 (SaCas9);
[0350] f. a first nucleic acid encoding one or more spacer sequences that is at least 90% identical to any one of SEQ ID NOs: 100-225, 2000-2116, or 4000-4251 and a second nucleic acid encoding a Staphylococcus lugdunensis (SluCas9);
[0351] g. a first nucleic acid encoding a pair of guide RNAs comprising a first and second spacer sequence selected from any one of SEQ ID NOs: 10 and 15; 10 and 16; 12 and 16; 1001 and 1005; 1001 and 15; 1001 and 16; 1003 and 1005; 16 and 1003; 12 and 1010; 12 and 1012; 12 and 1013; 10 and 1016; 1017 and 1005; 1017 and 16; 1018 and 16; 15 and 10; 16 and 10; 16 and 12; 1005 and 1001; 15 and 1001; 16 and 1001; 1005 and 1003; 1003 and 16; 1010 and 12; 1012 and 12; 1013 and 12; 1016 and 10; 1005 and 1017; 16 and 1017; and 16 and 1018; and a second nucleic acid encoding a Staphylococcus aureus Cas9 (SaCas9);
[0352] h. a first nucleic acid encoding a pair of guide RNAs comprising at least 17, 18, 19, 20, or 21 contiguous nucleotides of a first and second spacer sequence selected from any one of SEQ ID NOs: 10 and 15; 10 and 16; 12 and 16; 1001 and 1005; 1001 and 15; 1001 and 16; 1003 and 1005; 16 and 1003; 12 and 1010; 12 and 1012; 12 and 1013; 10 and 1016; 1017 and 1005; 1017 and 16; 1018 and 16; 15 and 10; 16 and 10; 16 and 12; 1005 and 1001; 15 and 1001; 16 and 1001; 1005 and 1003; 1003 and 16; 1010 and 12; 1012 and 12; 1013 and 12; 1016 and 10; 1005 and 1017; 16 and 1017; and 16 and 1018; and a second nucleic acid encoding a Staphylococcus aureus Cas9 (SaCas9);
[0353] i. a first nucleic acid encoding a pair of guide RNAs that is at least 90% identical to a first and second spacer sequence selected from any one of SEQ ID NOs: 10 and 15; 10 and 16; 12 and 16; 1001 and 1005; 1001 and 15; 1001 and 16; 1003 and 1005; 16 and 1003; 12 and 1010; 12 and 1012; 12 and 1013; 10 and 1016; 1017 and 1005; 1017 and 16; 1018 and 16; 15 and 10; 16 and 10; 16 and 12; 1005 and 1001; 15 and 1001; 16 and 1001; 1005 and 1003; 1003 and 16; 1010 and 12; 1012 and 12; 1013 and 12; 1016 and 10; 1005 and 1017; 16 and 1017; and 16 and 1018; and a second nucleic acid encoding a Staphylococcus aureus Cas9 (SaCas9);
[0354] j. a first nucleic acid encoding a pair of guide RNAs comprising a first and second spacer sequence selected from any one of SEQ ID NOs: 148 and 134; 149 and 135; 150 and 135; 131 and 136; 151 and 136; 139 and 131; 139 and 151; 140 and 131; 140 and 151; 141 and 148; 144 and 149; 144 and 150; 145 and 131; 145 and 151; 146 and 148; 134 and 148; 135 and 149; 135 and 150; 136 and 131; 136 and 151; 131 and 139; 151 and 139; 131 and 140; 151 and 140; 148 and 141; 149 and 144; 150 and 144; 131 and 145; 151 and 145; and 148 and 146; and a second nucleic acid encoding a Staphylococcus lugdunensis (SluCas9);
[0355] k. a first nucleic acid encoding a pair of guide RNAs comprising at least 17, 18, 19, 20, or 21 contiguous nucleotides of a first and second spacer sequence selected from any one of SEQ ID NOs: 148 and 134; 149 and 135; 150 and 135; 131 and 136; 151 and 136; 139 and 131; 139 and 151; 140 and 131; 140 and 151; 141 and 148; 144 and 149; 144 and 150; 145 and 131; 145 and 151; 146 and 148; 134 and 148; 135 and 149; 135 and 150; 136 and 131; 136 and 151; 131 and 139; 151 and 139; 131 and 140; 151 and 140; 148 and 141; 149 and 144; 150 and 144; 131 and 145; 151 and 145; and 148 and 146; and a second nucleic acid encoding a Staphylococcus lugdunensis (SluCas9);
[0356] l. a first nucleic acid encoding a pair of guide RNAs that is at least 90% identical to a first and second spacer sequence selected from any one of SEQ ID NOs: 148 and 134; 149 and 135; 150 and 135; 131 and 136; 151 and 136; 139 and 131; 139 and 151; 140 and 131; 140 and 151; 141 and 148; 144 and 149; 144 and 150; 145 and 131; 145 and 151; 146 and 148; 134 and 148; 135 and 149; 135 and 150; 136 and 131; 136 and 151; 131 and 139; 151 and 139; 131 and 140; 151 and 140; 148 and 141; 149 and 144; 150 and 144; 131 and 145; 151 and 145; and 148 and 146; and a second nucleic acid encoding a Staphylococcus lugdunensis (SluCas9);
[0357] m. a first nucleic acid encoding a pair of guide RNAs that is at least 90% identical to a first and second spacer sequence selected from any one of:
   [0358] i. SEQ ID NOS: 148 and 134,
   [0359] ii. SEQ ID Nos: 145 and 131,
   [0360] iii. SEQ ID Nos: 144 and 149;
   [0361] iv. SEQ ID Nos: 144 and 150;
   [0362] v. SEQ ID Nos: 146 and 148; and a second nucleic acid encoding a Staphylococcus lugdunensis (SluCas9); or
[0363] n. a first nucleic acid encoding a pair of guide RNAs that is at least 90% identical to a first and second spacer sequence selected from any one of:
   [0364] i. SEQ ID NOs: 12 and 1013; and
   [0365] ii. SEQ ID Nos: 12 and 1016; and a second nucleic acid encoding a Staphylococcus aureus Cas9 (SaCas9).

[0366] In some embodiments, a composition is provided comprising, consisting of, or consisting essentially of one or more nucleic acid molecules encoding a Staphylococcus lugdunensis (SluCas9) and at least two guide RNAs, wherein a first and second guide RNA target different sequences in a DMD gene, wherein the first and a second guide RNA comprise a sequence that is at least 90% identical to a first and second spacer sequence selected from any one of:
[0367] i. SEQ ID NOS: 148 and 134,
[0368] ii. SEQ ID Nos: 145 and 131,
[0369] iii. SEQ ID Nos: 144 and 149;
[0370] iv. SEQ ID Nos: 144 and 150;
[0371] v. SEQ ID Nos: 146 and 148.

[0372] In some embodiments, a composition is provided comprising, consisting of, or consisting essentially of one or more nucleic acid molecules encoding an endonuclease and at least two guide RNAs, wherein the guide RNAs each target a different sequence in a DMD gene, wherein the guide RNAs each comprise a sequence that is at least 90% identical to a first and second spacer sequence selected from any one of:
[0373] i. SEQ ID NOs: 12 and 1013; and
[0374] ii. SEQ ID Nos: 12 and 1016; and

[0375] a second nucleic acid encoding a Staphylococcus aureus Cas9 (SaCas9).

[0376] In some embodiments, the first and/or the second nucleic acid, if present, comprises at least two guide RNAs. In some embodiments, the first and/or the second nucleic acid, if present, comprises at least three guide RNAs. In some embodiments, the first and/or the second nucleic acid, if present, comprises at least four guide RNAs. In some embodiments, the first and/or the second nucleic acid, if present, comprises at least five guide RNAs. In some embodiments, the first and/or the second nucleic acid, if present, comprises at least six guide RNAs. In some embodiments, the first nucleic acid comprises an endonuclease and at least one, at least two, or at least three guide RNAs. In some embodiments, the first nucleic acid comprises an endonuclease and from one to n guide RNAs, wherein n is no more than the maximum number of guide RNAs that can be expressed from said nucleic acid. In some embodiments, the first nucleic acid comprises an endonuclease and from one to three guide RNAs.

[0377] In some embodiments, the second nucleic acid, if present, encodes at least one, at least two, at least three, at least four, at least five, or at least six guide RNAs. In some embodiments, the second nucleic acid, if present, encodes from one to n guide RNAs, wherein n is no more than the maximum number of guide RNAs that can be expressed from said nucleic acid In some embodiments, the second nucleic acid, if present, encodes from one to six guide RNAs. In some embodiments, the second nucleic acid, if present, encodes 2-10, 2-9, 2-8, 2-7, 2-6, 2-5, 2-4, or 2-3 guide RNAs. In some embodiments, the second nucleic acid, if present, encodes 2, 3, 4, 5, or 6 guide RNAs.

[0378] In some embodiments comprising at least two nucleic acid molecules, the guide RNA encoded by the first nucleic acid and the second nucleic acid are the same. In some embodiments comprising at least two nucleic acid molecules, the guide RNA encoded by the first nucleic acid and the second nucleic acid are different. In some embodiments comprising at least two nucleic acid molecules, at least one guide RNA binds to a target sequence within an exon in the DMD gene that is upstream of a premature stop codon, and wherein at least one guide RNA binds to a target sequence within an exon in the DMD gene that is downstream of a premature stop codon. In some embodiments comprising at least two nucleic acid molecules, the same guide RNA is encoded by the nucleic acid of the first and second nucleic acid molecule. In some embodiments comprising at least two nucleic acid molecules, the second nucleic acid molecule encodes a guide RNA that binds to the same target sequence as the guide RNA in the first nucleic acid molecule. In some embodiments comprising at least two nucleic acid molecules, the second nucleic acid molecule encodes at least 2, at least 3, at least 4, at least 5, or at least 6 guide RNAs, wherein the guide RNAs in the second nucleic acid molecule bind to the same target sequence as the guide RNA in the first nucleic acid molecule.

[0379] In some embodiments, the guide RNA binds to one or more target sequences within a DMD gene. In some embodiments, the guide RNA binds to one or more target sequences within an exon of the DMD gene. In some embodiments comprising two guide RNAs, i) each guide RNA targets a sequence within an exon; ii) one guide RNA targets a sequence within an exon and one targets a sequence within an intron; or iii) each guide RNA targets a sequence within an intron.

[0380] In some embodiments comprising at least two guide RNAs, i) each guide RNA targets the same genomic target sequence; ii) each guide RNA targets a different target sequence; or iii) at least one guide RNA targets one sequence and at least one guide RNA targets a different sequence.

[0381] In some embodiments comprising a guide RNA that binds to an exon of the DMD gene, the exon is selected from exon 43, 44, 45, 50, 51, and 53.

[0382] In some embodiments comprising at least two guide RNAs that binds to an exon of the DMD gene, at least one guide RNA binds to a target sequence within an exon in the DMD gene, and at least one guide RNA binds to a different target sequence within the same exon in the DMD gene.

[0383] In some embodiments comprising at least two guide RNAs, at least one guide RNA binds to a target sequence within an exon that is upstream of a premature stop codon, and at least one guide RNA binds to a target sequence within an exon that is downstream of a premature stop codon.

[0384] In some embodiments comprising at least two guide RNAs, at least one guide RNA binds to a target sequence within an exon in the DMD gene, and at least one guide RNA binds to a different target sequence within the same exon in the DMD gene, wherein when expressed in vivo or in vivo, a portion of the exon is excised. In some embodiments comprising at least two guide RNAs, wherein once expressed in vivo or in vivo, the guide RNAs excise a portion of the exon.

[0385] In some embodiments comprising at least two guide RNAs, wherein once expressed in vivo or in vivo, the guide RNAs excise a portion of the exon, and wherein the portion of the exon remaining after excision are rejoined with a one nucleotide insertion. In some embodiments comprising at least two guide RNAs, wherein once expressed in vivo or in vivo, the guide RNAs excise a portion of the exon, wherein the portion of the exon remaining after excision is rejoined without a nucleotide insertion.

[0386] In some embodiments comprising at least two guide RNAs, wherein once expressed in vivo or in vivo, the guide RNAs excise a portion of the exon, wherein the size of excised portion of the exon is between 5, 6, 7, 8, 9, 10, 15, or 20 and 250 nucleotides in length. In some embodiments comprising at least two guide RNAs, once expressed in vivo or in vivo, the guide RNAs excise a portion of the exon, wherein the size of excised portion of the exon is between 5 and 250, 5 and 200, 5 and 150, 5 and 100, 5 and 75, 5 and 50, 5 and 25, 5 and 10, 20 and 250, 20 and 200, 20 and 150, 20 and 100, 20 and 75, 20 and 50, 20 and 25, 50 and 250, 50 and 200, 50 and 150, 50 and 100, and 50 and 75 nucleotides.

[0387] In some embodiments comprising at least two guide RNAs, wherein once expressed in vivo or in vivo, the guide RNAs excise a portion of the exon, wherein the size of excised portion of the exon is between 8 and 167 nucleotides.

[0388] In some embodiments, a guide RNA and a Cas9 are provided on a single nucleic acid molecule. In some embodiments, the single nucleic acid molecule comprises a nucleic acid encoding a guide RNA and a nucleic acid encoding a SaCas9 or SluCas9. In some embodiments, two guide RNAs and a Cas9 are provided on a single nucleic acid molecule. In some embodiments, the single nucleic acid molecule comprises a nucleic acid encoding a first guide RNA, a nucleic acid encoding a second guide RNA, and a nucleic acid encoding a SaCas9 or SluCas9. In some embodiments, the spacer sequences of the first and second guide RNAs are identical. In some embodiments, the spacer sequences of the first and second guide RNAs are not identical.

[0389] In some embodiments, the single nucleic acid molecule is a single vector. In some embodiments, the single vector expresses the one or two guide RNAs and Cas9 according to the schemes of FIG. 1. In some embodiments, a guide RNA and a Cas9 are provided on a single vector. In some embodiments, the single vector comprises a nucleic acid encoding a guide RNA and a nucleic acid encoding a SaCas9 or SluCas9. In some embodiments, two guide RNAs and a Cas9 are provided on a single vector. In some embodiments, the single vector comprises a nucleic acid encoding a first guide RNA, a nucleic acid encoding a second guide RNA, and a nucleic acid encoding a SaCas9 or SluCas9. In some embodiments, the spacer sequences of the first and second guide RNAs are identical. In some embodiments, the spacer sequences of the first and second guide RNAs are not identical.

[0390] Each of the guide sequences shown in Table 1A, Table 1B, and Table 5 may further comprise additional nucleotides to form or encode a crRNA, e.g., using any known sequence appropriate for the Cas9 being used. In some embodiments, the crRNA comprises (5′ to 3′) at least a spacer sequence and a first complementarity domain. The first complementary domain is sufficiently complementary to a second complementarity domain, which may be part of the same molecule in the case of an sgRNA or in a tracrRNA in the case of a dual or modular gRNA, to form a duplex. See, e.g., US 2017/0007679 for detailed discussion of crRNA and gRNA domains, including first and second complementarity domains.

[0391] A single-molecule guide RNA (sgRNA) can comprise, in the 5′ to 3′ direction, an optional spacer extension sequence, a spacer sequence, a minimum CRISPR repeat sequence, a single-molecule guide linker, a minimum tracrRNA sequence, a 3′ tracrRNA sequence and/or an optional tracrRNA extension sequence. The optional tracrRNA extension can comprise elements that contribute additional functionality (e.g., stability) to the guide RNA. The single-molecule guide linker can link the minimum CRISPR repeat and the minimum tracrRNA sequence to form a hairpin structure. The optional tracrRNA extension can comprise one or more hairpins. In particular embodiments, the disclosure provides for an sgRNA comprising a spacer sequence and a tracrRNA sequence.

[0392] An exemplary scaffold sequence suitable for use with SaCas9 to follow the guide sequence at its 3′ end is: GTTTAAGTACTCTGTGCTGGAAACAGCACAGAATCTACTTAAACAAGGCAAAATGCCGT GTTTATCTCGTCAACTTGTTGGCGAGA (SEQ ID NO: 500) in 5′ to 3′ orientation. In some embodiments, an exemplary scaffold sequence for use with SaCas9 to follow the 3′ end of the guide sequence is a sequence that is at least 80%, 85%, 90%, 91%, 92%, 93%, 94%, 95%, 96%, 97%, 98%, 99% or 100% identical to SEQ ID NO: 500, or a sequence that differs from SEQ ID NO: 500 by no more than 1, 2, 3, 4, 5, 10, 15, 20, or 25 nucleotides.

[0393] In some embodiments, a variant of an SaCas9 scaffold sequence may be used. In some embodiments, the SaCas9 scaffold to follow the guide sequence at its 3′ end is referred to as “SaScaffoldV1” and is: GTTTTAGTACTCTGGAAACAGAATCTACTAAAACAAGGCAAAATGCCGTGTTTATCTCGT CAACTTGTTGGCGAGAT (SEQ ID NO: 501) in 5′ to 3′ orientation. In some embodiments, an exemplary scaffold sequence for use with SaCas9 to follow the 3′ end of the guide sequence is a sequence that is at least 80%, 85%, 90%, 91%, 92%, 93%, 94%, 95%, 96%, 97%, 98%, 99% or 100% identical to SEQ ID NO: 910, or a sequence that differs from SEQ ID NO: 910 by no more than 1, 2, 3, 4, 5, 10, 15, 20, or 25 nucleotides.

[0394] In some embodiments, a variant of an SaCas9 scaffold sequence may be used. In some embodiments, the SaCas9 scaffold to follow the guide sequence at its 3′ end is referred to as “SaScaffoldV2” and is: GTTTAAGTACTCTGTGCTGGAAACAGCACAGAATCTACTTAAACAAGGCAAAATGCCGT GTTTATCTCGTCAACTTGTTGGCGAGAT (SEQ ID NO: 502) in 5′ to 3′ orientation. In some embodiments, an exemplary scaffold sequence for use with SaCas9 to follow the 3′ end of the guide sequence is a sequence that is at least 80%, 85%, 90%, 91%, 92%, 93%, 94%, 95%, 96%, 97%, 98%, 99% or 100% identical to SEQ ID NO: 911, or a sequence that differs from SEQ ID NO: 911 by no more than 1, 2, 3, 4, 5, 10, 15, 20, or 25 nucleotides.

[0395] In some embodiments, a variant of an SaCas9 scaffold sequence may be used. In some embodiments, the SaCas9 scaffold to follow the guide sequence at its 3′ end is referred to as “SaScaffoldV3” and is: GTTTAAGTACTCTGGAAACAGAATCTACTTAAACAAGGCAAAATGCCGTGTTTATCTCGT CAACTTGTTGGCGAGAT (SEQ ID NO: 503) in 5′ to 3′ orientation. In some embodiments, an exemplary scaffold sequence for use with SaCas9 to follow the 3′ end of the guide sequence is a sequence that is at least 80%, 85%, 90%, 91%, 92%, 93%, 94%, 95%, 96%, 97%, 98%, 99% or 100% identical to SEQ ID NO: 912, or a sequence that differs from SEQ ID NO: 912 by no more than 1, 2, 3, 4, 5, 10, 15, 20, or 25 nucleotides.

[0396] In some embodiments, a variant of an SaCas9 scaffold sequence may be used. In some embodiments, the SaCas9 scaffold to follow the guide sequence at its 3′ end is referred to as “SaScaffoldV5” and is: GTTTCAGTACTCTGGAAACAGAATCTACTGAAACAAGGCAAAATGCCGTGTTTATCTCGT CAACTTGTTGGCGAGAT (SEQ ID NO: 932) in 5′ to 3′ orientation. In some embodiments, an exemplary scaffold sequence for use with SaCas9 to follow the 3′ end of the guide sequence is a sequence that is at least 80%, 85%, 90%, 91%, 92%, 93%, 94%, 95%, 96%, 97%, 98%, 99% or 100% identical to SEQ ID NO: 932, or a sequence that differs from SEQ ID NO: 932 by no more than 1, 2, 3, 4, 5, 10, 15, 20, or 25 nucleotides.

[0397] Two exemplary scaffold sequences suitable for use with SluCas9 to follow the guide sequence at its 3′ end is: GTTTTAGTACTCTGGAAACAGAATCTACTGAAACAAGACAATATGTCGTGTTTATCCCAT CAATTTATTGGTGGGA (SEQ ID NO: 900), and GTTTAAGTACTCTGTGCTGGAAACAGCACAGAATCTACTGAAACAAGACAATATGTCGT GTTTATCCCATCAATTTATTGGTGGGA (SEQ ID NO: 601) in 5′ to 3′ orientation. In some embodiments, an exemplary sequence for use with SluCas9 to follow the 3′ end of the guide sequence is a sequence that is at least 80%, 85%, 90%, 91%, 92%, 93%, 94%, 95%, 96%, 97%, 98%, 99% or 100% identical to SEQ ID NO: 900 or SEQ ID NO: 601, or a sequence that differs from SEQ ID NO: 900 or SEQ ID NO: 601 by no more than 1, 2, 3, 4, 5, 10, 15, 20, or 25 nucleotides.

[0398] Exemplary scaffold sequences suitable for use with SluCas9 to follow the guide sequence at its 3′ end are also shown below in the 5′ to 3′ orientation:

| | | | | Streak of |
|---|---|---|---|---|
| | | | | Homology to |
| Scaffold | SEQ | | Homology | Slu v5 |
| ID | ID NO | Scaffold Sequence (5′ to 3′) | to Slu v5 | (# nucleotides) |
| Wildtype | 900 | GTTTTAGTACTCTGGAAACAGAATCTACTGAA | N/A | N/A |
| | | ACAAGACAATATGTCGTGTTTATCCCATCAAT | | |
| | | TTATTGGTGGGAT | | |
| Slu- | 601 | GTTTAAGTACTCTGTGCTGGAAACAGCACAG | N/A | N/A |
| VCGT- | | AATCTACTGAAACAAGACAATATGTCGTGTTT | | |
| 4.5 | | ATCCCATCAATTTATTGGTGGGA | | |
| Slu v5 | 901 | GTTTCAGTACTCTGGAAACAGAATCTACTGAA | 100.00% | 77 |
| | | ACAAGACAATATGTCGTGTTTATCCCATCAAT | | |
| | | TTATTGGTGGGAT | | |
| Slu v5-1 | 902 | GTTTggTaACcTaGGAAACTagATCTTaccAAACA | 87.50% | 47 |
| | | AGACAATATGTCGTGTTTATCCCATCAATTTA | | |
| | | TTGGTGGGAT | | |
| Slu v5-2 | 903 | GTTTCAGTACTCTGGAAACAGAATCTACTGAA | 96.10% | 37 |
| | | ACAAGgCAAaATGcCGTGTTTATCCCATCAATT | | |
| | | TATTGGTGGGAT | | |
| Slu v5-3 | 904 | GTTTCAGTACTCTGGAAACAGAATCTACTGAA | 94.81% | 48 |
| | | ACAAGACAATATGTCGcgcccaTCCCATCAATTT | | |
| | | ATTGGTGGGAT | | |
| Slu v5-4 | 905 | GTTTCAGTACTCTGGAAACAGAATCTACTGAA | 91.55% | 55 |
| | | ACAAGACAATATGTCGTGTTTATgggTTgAATT | | |
| | | TATTcGacccAT | | |
| Slu v5-5 | 906 | GTTTggTaACcTaGGAAACTagATCTTaccAAACA | 83.75% | 31 |
| | | AGgCAAaATGcCGTGTTTATCCCATCAATTTAT | | |
| | | TGGTGGGAT | | |
| Slu v5-6 | 907 | GTTTggTaACcTaGGAAACTagATCTTaccAAACA | 82.50% | 23 |
| | | AGACAATATGTCGcgcccaTCCCATCAATTTATT | | |
| | | GGTGGGAT | | |
| Slu v5-7 | 908 | GTTTggTaACcTaGGAAACTagATCTTaccAAACA | 78.38% | 25 |
| | | AGACAATATGTCGTGTTTATgggTTgAATTTAT | | |
| | | TcGacccAT | | |
| Slu v5-8 | 909 | GTTTCAGTACTCTGGAAACAGAATCTACTGAA | 90.91% | 37 |
| | | ACAAGgCAAaATGcCGcgcccaTCCCATCAATTTA | | |
| | | TTGGTGGGAT | | |
| Slu v5-9 | 910 | GTTTCAGTACTCTGGAAACAGAATCTACTGAA | 87.32% | 37 |
| | | ACAAGgCAAaATGcCGTGTTTATgggTTgAATTT | | |
| | | ATTcGacccAT | | |
| Slu v5- | 911 | GTTTCAGTACTCTGGAAACAGAATCTACTGAA | 82.89% | 48 |
| 10 | | ACAAGACAATATGTCGcgcccaTgggTTgAATTTA | | |
| | | TTcGacccAT | | |
| Slu v5- | 912 | GTTTggTaACcTaGGAAACTagATCTTaccAAACA | 78.75% | 23 |
| 11 | | AGgCAAaATGcCGcgcccaTCCCATCAATTTATTG | | |
| | | GTGGGAT | | |
| Slu v5- | 913 | GTTTggTaACcTaGGAAACTagATCTTaccAAACA | 74.32% | 9 |
| 12 | | AGgCAAaATGcCGTGTTTATgggTTgAATTTATTc | | |
| | | GacccAT | | |
| Slu v5- | 914 | GTTTggTaACcTaGGAAACTagATCTTaccAAACA | 70.89% | 18 |
| 13 | | AGACAATATGTCGcgcccaTgggTTgAATTTATTc | | |
| | | GacccAT | | |
| Slu v5- | 915 | GTTTCAGTACTCTGGAAACAGAATCTACTGAA | 78.95% | 37 |
| 14 | | ACAAGgCAAaATGcCGcgcccaTgggTTgAATTTAT | | |
| | | TcGacccAT | | |
| Slu v5- | 916 | GTTTggTaACcTaGGAAACTagATCTTaccAAACA | 67.09% | 8 |
| 15 | | AGgCAAaATGcCGcgcccaTgggTTgAATTTATTcGa | | |
| | | cccAT | | |
| Slu v4 | 917 | GTTTCAGTACTCTGTGCTGGAAACAGCACAGA | N/A | N/A |
| | | ATCTACTGAAACAAGACAATATGTCGTGTTTA | | |
| | | TCCCATCAATTTATTGGTGGGAT | | |

[0399] In some embodiments, the scaffold sequence suitable for use with SluCas9 to follow the guide sequence at its 3′ end is selected from any one of SEQ ID NOs: 900 or 601, or 901-917 in 5′ to 3 orientation (see below). In some embodiments, an exemplary sequence for use with SluCas9 to follow the 3′ end of the guide sequence is a sequence that is at least 65%, 70%, 75%, 80%, 85%, 90%, 91%, 92%, 93%, 94%, 95%, 96%, 97%, 98%, 99% or 100% identical to any one off SEQ ID NOs: 900 or 601, or 901-917, or a sequence that differs from any one of SEQ ID NOs: 900 or 601, or 901-917 by no more than 1, 2, 3, 4, 5, 10, 15, 20, or 25 nucleotides.

[0400] In some embodiments, the scaffold sequence suitable for use with SluCas9 to follow the guide sequence at its 3′ end is selected from any one of SEQ ID NOs: 901-917 in 5′ to 3 orientation (see below). In some embodiments, an exemplary sequence for use with SluCas9 to follow the 3′ end of the guide sequence is a sequence that is at least 65%, 70%, 75%, 80%, 85%, 90%, 91%, 92%, 93%, 94%, 95%, 96%, 97%, 98%, 99% or 100% identical to any one off SEQ ID NOs: 901-917, or a sequence that differs from any one of SEQ ID NOs: 901-917 by no more than 1, 2, 3, 4, 5, 10, 15, 20, or 25 nucleotides.

[0401] In some embodiments, the nucleic acid encoding the gRNA or the nucleic acid encoding the pair of gRNAs comprises a sequence comprising SEQ ID NO: 900. In some embodiments, the nucleic acid encoding the gRNA or the nucleic acid encoding the pair of gRNAs comprises a sequence comprising SEQ ID NO: 601. In some embodiments, the nucleic acid encoding the gRNA or the nucleic acid encoding the pair of gRNAs comprises a sequence comprising SEQ ID NO: 900. In some embodiments, the nucleic acid encoding the gRNA or the nucleic acid encoding the pair of gRNAs comprises a sequence comprising SEQ ID NO: 901. In some embodiments, the nucleic acid encoding the gRNA or the nucleic acid encoding the pair of gRNAs comprises a sequence comprising SEQ ID NO: 902. In some embodiments, the nucleic acid encoding the gRNA or the nucleic acid encoding the pair of gRNAs comprises a sequence comprising SEQ ID NO: 903. In some embodiments, the nucleic acid encoding the gRNA or the nucleic acid encoding the pair of gRNAs comprises a sequence comprising SEQ ID NO: 904. In some embodiments, the nucleic acid encoding the gRNA or the nucleic acid encoding the pair of gRNAs comprises a sequence comprising SEQ ID NO: 905. In some embodiments, the nucleic acid encoding the gRNA or the nucleic acid encoding the pair of gRNAs comprises a sequence comprising SEQ ID NO: 906. In some embodiments, the nucleic acid encoding the gRNA or the nucleic acid encoding the pair of gRNAs comprises a sequence comprising SEQ ID NO: 907. In some embodiments, the nucleic acid encoding the gRNA or the nucleic acid encoding the pair of gRNAs comprises a sequence comprising SEQ ID NO: 908. In some embodiments, the nucleic acid encoding the gRNA or the nucleic acid encoding the pair of gRNAs comprises a sequence comprising SEQ ID NO: 909. In some embodiments, the nucleic acid encoding the gRNA or the nucleic acid encoding the pair of gRNAs comprises a sequence comprising SEQ ID NO: 910. In some embodiments, the nucleic acid encoding the gRNA or the nucleic acid encoding the pair of gRNAs comprises a sequence comprising SEQ ID NO: 911. In some embodiments, the nucleic acid encoding the gRNA or the nucleic acid encoding the pair of gRNAs comprises a sequence comprising SEQ ID NO: 912. In some embodiments, the nucleic acid encoding the gRNA or the nucleic acid encoding the pair of gRNAs comprises a sequence comprising SEQ ID NO: 913. In some embodiments, the nucleic acid encoding the gRNA or the nucleic acid encoding the pair of gRNAs comprises a sequence comprising SEQ ID NO: 914. In some embodiments, the nucleic acid encoding the gRNA or the nucleic acid encoding the pair of gRNAs comprises a sequence comprising SEQ ID NO: 915. In some embodiments, the nucleic acid encoding the gRNA or the nucleic acid encoding the pair of gRNAs comprises a sequence comprising SEQ ID NO: 916. In some embodiments, the nucleic acid encoding the gRNA or the nucleic acid encoding the pair of gRNAs comprises a sequence comprising SEQ ID NO: 917. In some embodiments, comprising a pair of gRNAs, one of the gRNAs comprises a sequence selected from any one of SEQ ID NOs: 900 or 601, or 901-917. In some embodiments, comprising a pair of gRNAs, both of the gRNAs comprise a sequence selected from any one of SEQ ID NOs: 900 or 601, or 901-917. In some embodiments, comprising a pair of gRNAs, the nucleotides 3′ of the guide sequence of the gRNAs are the same sequence. In some embodiments, comprising a pair of gRNAs, the nucleotides 3′ of the guide sequence of the gRNAs are different sequences.

[0402] In some embodiments, the scaffold sequence comprises one or more alterations in the stem loop 1 as compared to the stem loop 1 of a wildtype SluCas9 scaffold sequence (e.g., a scaffold comprising the sequence of SEQ ID NO: 900) or a reference SluCas9 scaffold sequence (e.g., a scaffold comprising the sequence of SEQ ID NO: 901). In some embodiments, the scaffold sequence comprises one or more alterations in the stem loop 2 as compared to the stem loop 2 of a wildtype SluCas9 scaffold sequence (e.g., a scaffold comprising the sequence of SEQ ID NO: 900) or a reference SluCas9 scaffold sequence (e.g., a scaffold comprising the sequence of SEQ ID NO: 901). In some embodiments, the scaffold sequence comprises one or more alterations in the tetraloop as compared to the tetraloop of a wildtype SluCas9 scaffold sequence (e.g., a scaffold comprising the sequence of SEQ ID NO: 900) or a reference SluCas9 scaffold sequence (e.g., a scaffold comprising the sequence of SEQ ID NO: 901). In some embodiments, the scaffold sequence comprises one or more alterations in the repeat region as compared to the repeat region of a wildtype SluCas9 scaffold sequence (e.g., a scaffold comprising the sequence of SEQ ID NO: 900) or a reference SluCas9 scaffold sequence (e.g., a scaffold comprising the sequence of SEQ ID NO: 901). In some embodiments, the scaffold sequence comprises one or more alterations in the anti-repeat region as compared to the anti-repeat region of a wildtype SluCas9 scaffold sequence (e.g., a scaffold comprising the sequence of SEQ ID NO: 900) or a reference SluCas9 scaffold sequence (e.g., a scaffold comprising the sequence of SEQ ID NO: 901). In some embodiments, the scaffold sequence comprises one or more alterations in the linker region as compared to the linker region of a wildtype SluCas9 scaffold sequence (e.g., a scaffold comprising the sequence of SEQ ID NO: 900) or a reference SluCas9 scaffold sequence (e.g., a scaffold comprising the sequence of SEQ ID NO: 901). See, e.g., Nishimasu et al., 2015, Cell, 162:1113-1126 for description of regions of a scaffold.

[0403] Where a tracrRNA is used, in some embodiments, it comprises (5′ to 3′) a second complementary domain and a proximal domain. In the case of a sgRNA, guide sequences together with additional nucleotides (e.g., SEQ ID Nos: 500, or 910-912 (for SaCas9), and 900 or 601, or 901-917 (for SluCas9)) form or encode a sgRNA. In some embodiments, an sgRNA comprises (5′ to 3′) at least a spacer sequence, a first complementary domain, a linking domain, a second complementary domain, and a proximal domain. A sgRNA or tracrRNA may further comprise a tail domain. The linking domain may be hairpin-forming. See, e.g., US 2017/0007679 for detailed discussion and examples of crRNA and gRNA domains, including second complementarity domains, linking domains, proximal domains, and tail domains.

[0404] In general, in the case of a DNA nucleic acid construct encoding a guide RNA, the U residues in any of the RNA sequences described herein may be replaced with T residues, and in the case of a guide RNA construct encoded by a DNA, the T residues may be replaced with U residues.

[0405] Provided herein are compositions comprising one or more guide RNAs or one or more nucleic acids encoding one or more guide RNAs comprising a guide sequence disclosed herein in Table 1A, Table 1B, and Table 5 and throughout the specification.

[0406] In some embodiments, a composition is provided comprising a guide RNA, or nucleic acid encoding a guide RNA, wherein the guide RNA comprises 17, 18, 19, or 20 contiguous nucleotides of any one of the guide sequences disclosed herein in Table 1A, Table 1B, and Table 5 and throughout the specification.

[0407] In some embodiments, a composition is provided comprising a guide RNA, or nucleic acid encoding a guide RNA, wherein the guide RNA comprises a sequence with about 75%, 80%, 85%, 90%, 95%, 96%, 97%, 98%, 99%, or 100% identity to at least 17, 18, 19, or 20 contiguous nucleotides of a guide sequence shown in Table 1A, Table 1B, and Table 5 and throughout the specification.

[0408] In some embodiments, a composition is provided comprising a guide RNA, or nucleic acid encoding a guide RNA, wherein the guide RNA comprises a sequence with about 75%, 80%, 85%, 90%, 95%, 96%, 97%, 98%, 99%, or 100% identity to a guide sequence shown in Table 1A, Table 1B, and Table 5 and throughout the specification.

[0409] In some embodiments, a composition is provided comprising a guide RNA, or nucleic acid encoding a guide RNA, wherein the guide RNA comprises a spacer sequence selected from any one of SEQ ID NOs: 10, 12, 15, 16, 20, 27, 28, 32, 33, 35, 1001, 1003, 1005, 1010, 1012, 1013, 1016, 1017, and 1018 (for SaCas9). In some embodiments, the spacer sequence is SEQ ID NO: 10. In some embodiments, the spacer sequence is SEQ ID NO: 12. In some embodiments, the spacer sequence is SEQ ID NO: 15. In some embodiments, the spacer sequence is SEQ ID NO: 16. In some embodiments, the spacer sequence is SEQ ID NO: 20. In some embodiments, the spacer sequence is SEQ ID NO: 27. In some embodiments, the spacer sequence is SEQ ID NO: 28. In some embodiments, the spacer sequence is SEQ ID NO: 32. In some embodiments, the spacer sequence is SEQ ID NO: 33. In some embodiments, the spacer sequence is SEQ ID NO: 35. In some embodiments, the spacer sequence is SEQ ID NO: 1001. In some embodiments, the spacer sequence is SEQ ID NO: 1003. In some embodiments, the spacer sequence is SEQ ID NO: 1005. In some embodiments, the spacer sequence is SEQ ID NO: 1010. In some embodiments, the spacer sequence is SEQ ID NO: 1012. In some embodiments, the spacer sequence is SEQ ID NO: 1013. In some embodiments, the spacer sequence is SEQ ID NO: 1016. In some embodiments, the spacer sequence is SEQ ID NO: 1017. In some embodiments, the spacer sequence is SEQ ID NO: 1018.

[0410] In some embodiments, a composition is provided comprising a guide RNA, or nucleic acid encoding a guide RNA, wherein the guide RNA comprises a spacer sequence selected from any one of SEQ ID NOs: 3022, 3023, 3028, 3029, 3030, 3031, 3038, 3039, 3052, 3053, 3054, 3055, 3062, 3063, 3064, 3065, 3068, and 3069 (for SaCas9). In some embodiments, the spacer sequence is SEQ ID NO: 3022. In some embodiments, the spacer sequence is SEQ ID NO: 3023. In some embodiments, the spacer sequence is SEQ ID NO: 3028. In some embodiments, the spacer sequence is SEQ ID NO: 3029. In some embodiments, the spacer sequence is SEQ ID NO: 3030. In some embodiments, the spacer sequence is SEQ ID NO: 3031. In some embodiments, the spacer sequence is SEQ ID NO: 3038. In some embodiments, the spacer sequence is SEQ ID NO: 3039. In some embodiments, the spacer sequence is SEQ ID NO: 3052. In some embodiments, the spacer sequence is SEQ ID NO: 3053. In some embodiments, the spacer sequence is SEQ ID NO: 3054. In some embodiments, the spacer sequence is SEQ ID NO: 3055. In some embodiments, the spacer sequence is SEQ ID NO: 3062. In some embodiments, the spacer sequence is SEQ ID NO: 3063. In some embodiments, the spacer sequence is SEQ ID NO: 3064. In some embodiments, the spacer sequence is SEQ ID NO: 3065. In some embodiments, the spacer sequence is SEQ ID NO: 3068. In some embodiments, the spacer sequence is SEQ ID NO: 3069.

[0411] In some embodiments, a composition is provided comprising a guide RNA, or nucleic acid encoding a guide RNA, wherein the guide RNA comprises a spacer sequence selected from any one of SEQ ID NOs: 131, 134, 135, 136, 139, 140, 141, 144, 145, 146, 148, 149, 150, 151, 179, 184, 201, 210, 223, 224, 225 (for SluCas9). In some embodiments, the spacer sequence is SEQ ID NO: 131. In some embodiments, the spacer sequence is SEQ ID NO: 134. In some embodiments, the spacer sequence is SEQ ID NO: 135. In some embodiments, the spacer sequence is SEQ ID NO: 136. In some embodiments, the spacer sequence is SEQ ID NO: 139. In some embodiments, the spacer sequence is SEQ ID NO: 140. In some embodiments, the spacer sequence is SEQ ID NO: 141. In some embodiments, the spacer sequence is SEQ ID NO: 144. In some embodiments, the spacer sequence is SEQ ID NO: 145. In some embodiments, the spacer sequence is SEQ ID NO: 146. In some embodiments, the spacer sequence is SEQ ID NO: 148. In some embodiments, the spacer sequence is SEQ ID NO: 149. In some embodiments, the spacer sequence is SEQ ID NO: 150. In some embodiments, the spacer sequence is SEQ ID NO: 151. In some embodiments, the spacer sequence is SEQ ID NO: 179. In some embodiments, the spacer sequence is SEQ ID NO: 184. In some embodiments, the spacer sequence is SEQ ID NO: 201. In some embodiments, the spacer sequence is SEQ ID NO: 223. In some embodiments, the spacer sequence is SEQ ID NO: 224. In some embodiments, the spacer sequence is SEQ ID NO: 225.

[0412] In some embodiments, a composition is provided comprising a guide RNA, or nucleic acid encoding a guide RNA, wherein the guide RNA comprises a spacer sequence selected from any one of SEQ ID NOs: 4062, 4063, 4068, 4069, 4070, 4071, 4072, 4073, 4078, 4079, 4088, 4089, 4096, 4097, 4098, 4099, 4100, 4101, 4102, 4103, 4158, 4159, 4168, 4169, 4202, 4203, 4220, 4221, 4246, 4247, 4248, 4249, 4250, 4251 (for SluCas9). In some embodiments, the spacer sequence is SEQ ID NO: 4062. In some embodiments, the spacer sequence is SEQ ID NO: 4063. In some embodiments, the spacer sequence is SEQ ID NO: 4068. In some embodiments, the spacer sequence is SEQ ID NO: 4069. In some embodiments, the spacer sequence is SEQ ID NO: 4070. In some embodiments, the spacer sequence is SEQ ID NO: 4071. In some embodiments, the spacer sequence is SEQ ID NO: 4072. In some embodiments, the spacer sequence is SEQ ID NO: 4073. In some embodiments, the spacer sequence is SEQ ID NO: 4078. In some embodiments, the spacer sequence is SEQ ID NO: 4079. In some embodiments, the spacer sequence is SEQ ID NO: 4088. In some embodiments, the spacer sequence is SEQ ID NO: 4089. In some embodiments, the spacer sequence is SEQ ID NO: 4096. In some embodiments, the spacer sequence is SEQ ID NO: 4097. In some embodiments, the spacer sequence is SEQ ID NO: 4098. In some embodiments, the spacer sequence is SEQ ID NO: 4099. In some embodiments, the spacer sequence is SEQ ID NO: 4100. In some embodiments, the spacer sequence is SEQ ID NO: 4101. In some embodiments, the spacer sequence is SEQ ID NO: 4102. In some embodiments, the spacer sequence is SEQ ID NO: 4103. In some embodiments, the spacer sequence is SEQ ID NO: 4158. In some embodiments, the spacer sequence is SEQ ID NO: 4159. In some embodiments, the spacer sequence is SEQ ID NO: 4168. In some embodiments, the spacer sequence is SEQ ID NO: 4169. In some embodiments, the spacer sequence is SEQ ID NO: 4202. In some embodiments, the spacer sequence is SEQ ID NO: 4203. In some embodiments, the spacer sequence is SEQ ID NO: 4220. In some embodiments, the spacer sequence is SEQ ID NO: 4221. In some embodiments, the spacer sequence is SEQ ID NO: 4246. In some embodiments, the spacer sequence is SEQ ID NO: 4247. In some embodiments, the spacer sequence is SEQ ID NO: 4248. In some embodiments, the spacer sequence is SEQ ID NO: 4249. In some embodiments, the spacer sequence is SEQ ID NO: 4250. In some embodiments, the spacer sequence is SEQ ID NO: 4251.

[0413] In some embodiments, a composition is provided comprising a guide RNA, or nucleic acid encoding a guide RNA, wherein the guide RNA further comprises a trRNA. In each composition and method embodiment described herein, the crRNA (comprising the spacer sequence) and trRNA may be associated as a single RNA (sgRNA) or may be on separate RNAs (dgRNA). In the context of sgRNAs, the crRNA and trRNA components may be covalently linked, e.g., via a phosphodiester bond or other covalent bond.

[0414] In one aspect, a composition is provided comprising a single nucleic acid molecule encoding, or two nucleic acid molecules where one molecule encodes, 1) one or more guide RNA that comprises a guide sequence selected from any one of SEQ ID NOs: 1-35, 1000-1078, or 3000-3069; and 2) a SaCas9. In one aspect, a composition is provided comprising a single nucleic acid molecule encoding, or two nucleic acid molecules where one molecule encodes, 1) one or more guide RNA that comprises a guide sequence selected from any one of SEQ ID NOs: 100-225, 2000-2116, or 4000-4251; and 2) a SluCas9.

[0415] In one aspect, a composition is provided comprising a single nucleic acid molecule encoding, or two nucleic acid molecules where one molecule encodes, 1) one or more guide RNA that comprises a guide sequence that is at least 99%, 98%, 97%, 96%, 95%, 94%, 93%, 92%, 91%, or 90% identical to any one of SEQ ID NOs: 1-35, 1000-1078, 3000-3069; and 2) a SaCas9. In one aspect, a composition is provided comprising a single nucleic acid molecule encoding 1) one or more guide RNA that comprises a guide sequence that is at least 99%, 98%, 97%, 96%, 95%, 94%, 93%, 92%, 91%, or 90% identical to any one of SEQ ID NOs: 100-225, 2000-2116, or 4000-4251; and 2) a SluCas9.

[0416] In another aspect, a composition is provided comprising a single nucleic acid molecule encoding, or two nucleic acid molecules where one molecule encodes, 1) one or more guide RNA that comprises a guide sequence comprising at least 17, 18, 19, or 20 contiguous nucleotides of a spacer sequence selected from any one of SEQ ID NOs: 1-35, 1000-1078, or 3000-3069; and 2) a SaCas9. In another aspect, a composition is provided comprising a single nucleic acid molecule encoding, or two nucleic acid molecules where one molecule encodes, 1) one or more guide RNA that comprises a guide sequence comprising at least 17, 18, 19, or 20 contiguous nucleotides of a spacer sequence selected from any one of SEQ ID NOs: 100-225, 2000-2116, or 4000-4251; and 2) a SluCas9.

[0417] In any embodiment comprising a nucleic acid molecule encoding a guide RNA and/or a Cas9, the nucleic acid molecule may be a vector. In some embodiments, a composition is provided comprising a single nucleic acid molecule encoding a guide RNA and Cas9, wherein the nucleic acid molecule is a vector.

[0418] Any type of vector, such as any of those described herein, may be used. In some embodiments, the vector is a viral vector. In some embodiments, the viral vector is a non-integrating viral vector (i.e., that does not insert sequence from the vector into a host chromosome). In some embodiments, the viral vector is an adeno-associated virus vector (AAV), a lentiviral vector, an integrase-deficient lentiviral vector, an adenoviral vector, a vaccinia viral vector, an alphaviral vector, or a herpes simplex viral vector. In some embodiments, the vector comprises a muscle-specific promoter. Exemplary muscle-specific promoters include a muscle creatine kinase promoter, a desmin promoter, an MHCK7 promoter, or an SPc5-12 promoter. See US 2004/0175727 A1; Wang et al., Expert Opin Drug Deliv. (2014) 11, 345-364; Wang et al., Gene Therapy (2008) 15, 1489-1499. In some embodiments, the muscle-specific promoter is a CK8 promoter. In some embodiments, the muscle-specific promoter is a CK8e promoter. In any of the foregoing embodiments, the vector may be an adeno-associated virus vector (AAV).

[0419] In some embodiments, the muscle specific promoter is the CK8 promoter. The CK8 promoter has the following sequence (SEQ ID NO. 700):

| | |
|---|---|
| 1 | CTAGACTAGC ATGCTGCCCA TGTAAGGAGG CAAGGCCTGG GGACACCCGA GATGCCTGGT |
| 61 | TATAATTAAC CCAGACATGT GGCTGCCCCC CCCCCCCCAA CACCTGCTGC CTCTAAAAAT |
| 121 | AACCCTGCAT GCCATGTTCC CGGCGAAGGG CCAGCTGTCC CCCGCCAGCT AGACTCAGCA |
| 181 | CTTAGTTTAG GAACCAGTGA GCAAGTCAGC CCTTGGGGCA GCCCATACAA GGCCATGGGG |
| 241 | CTGGGCAAGC TGCACGCCTG GGTCCGGGGT GGGCACGGTG CCCGGGCAAC GAGCTGAAAG |
| 301 | CTCATCTGCT CTCAGGGGCC CCTCCCTGGG GACAGCCCCT CCTGGCTAGT CACACCCTGT |
| 361 | AGGCTCCTCT ATATAACCCA GGGGCACAGG GGCTGCCCTC ATTCTACCAC CACCTCCACA |
| 421 | GCACAGACAG ACACTCAGGA GCCAGCCAGC |

[0420] In some embodiments, the muscle-cell cell specific promoter is a variant of the CK8 promoter, called CK8e. In some embodiments, the size of the CK8e promoter is 436 bp. The CK8e promoter has the following sequence (SEQ ID NO. 701):

| | |
|---|---|
| 1 | TGCCCATGTA AGGAGGCAAG GCCTGGGGAC ACCCGAGATG CCTGGTTATA ATTAACCCAG |
| 61 | ACATGTGGCT GCCCCCCCCC CCCCAACACC TGCTGCCTCT AAAAATAACC CTGCATGCCA |
| 121 | TGTTCCCGGC GAAGGGCCAG CTGTCCCCCG CCAGCTAGAC TCAGCACTTA GTTTAGGAAC |
| 181 | CAGTGAGCAA GTCAGCCCTT GGGGCAGCCC ATACAAGGCC ATGGGGCTGG GCAAGCTGCA |
| 241 | CGCCTGGGTC CGGGGTGGGC ACGGTGCCCG GGCAACGAGC TGAAAGCTCA TCTGCTCTCA |
| 301 | GGGGCCCCTC CCTGGGGACA GCCCCTCCTG GCTAGTCACA CCCTGTAGGC TCCTCTATAT |
| 361 | AACCCAGGGG CACAGGGGCT GCCCTCATTC TACCACCACC TCCACAGCAC AGACAGACAC |
| 421 | TCAGGAGCCA GCCAGC |

[0421] In some embodiments, the vector comprises one or more of a U6, H1, or 7SK promoter. In some embodiments, the U6 promoter is the human U6 promoter (e.g., the U6L promoter or U6S promoter). In some embodiments, the promoter is the murine U6 promoter. In some embodiments, the 7SK promoter is a human 7SK promoter. In some embodiments, the 7SK promoter is the 7SK1 promoter. In some embodiments, the 7SK promoter is the 7SK2 promoter. In some embodiments, the H1 promoter is a human H1 promoter (e.g., the H1L promoter or the H1S promoter). In some embodiments, the vector comprises multiple guide sequences, wherein each guide sequence is under the control of a separate promoter. In some embodiments, each of the multiple guide sequences comprises a different sequence. In some embodiments, each of the multiple guide sequences comprise the same sequence (e.g., each of the multiple guide sequences comprise the same spacer sequence). In some embodiments, each of the multiple guide sequences comprises the same spacer sequence and the same scaffold sequence. In some embodiments, each of the multiple guide sequences comprises different spacer sequences and different scaffold sequences. In some embodiments, each of the multiple guide sequences comprises the same spacer sequence, but comprises a different scaffold sequence. In some embodiments, each of the multiple guide sequences comprises different spacer sequences and different scaffold sequences. In some embodiments, each of the separate promoters comprises the same nucleotide sequence (e.g., the U6 promoter sequence). In some embodiments, each of the separate promoters comprises a different nucleotide sequence (e.g., the U6, H1, and/or 7SK promoter sequence).

[0422] In some embodiments, the U6 promoter comprises a nucleotide sequence that is at least 90%, 91%, 92%, 93%, 94%, 95%, 96%, 97%, 98%, 99% or 100% identical to the sequence of SEQ ID NO: 702:

| | |
|---|---|
| cgagtccaac acccgtggga atcccatggg caccatggcc cctcgctcca aaaatgcttt | 60 |
| cgcgtcgcgc agacactgct cggtagtttc ggggatcagc gtttgagtaa gagcccgcgt | 120 |
| ctgaaccctc cgcgccgccc cggccccagt ggaaagacgc gcaggcaaaa cgcaccacgt | 180 |
| gacggagcgt gaccgcgcgc cgagcgcgcg ccaaggtcgg gcaggaagag ggcctatttc | 240 |
| ccatgattcc ttcatatttg catatacgat acaaggctgt tagagagata attagaatta | 300 |
| atttgactgt aaacacaaag atattagtac aaaatacgtg acgtagaaag taataatttc | 360 |
| ttgggtagtt tgcagtttta aaattatgtt ttaaaatgga ctatcatatg cttaccgtaa | 420 |
| cttgaaagta tttcgatttc ttggctttat atatcttgtg gaaaggacga aa | 472 |

[0423] In some embodiments, the H1 promoter comprises a nucleotide sequence that is at least 90%, 91%, 92%, 93%, 94%, 95%, 96%, 97%, 98%, 99% or 100% identical to the sequence of SEQ ID NO: 703:

| | |
|---|---|
| gctcggcgcg cccatatttg catgtcgcta tgtgttctgg gaaatcacca taaacgtgaa | 60 |
| atgtctttgg atttgggaat cttataagtt ctgtatgaga ccacggta | 108 |

[0424] In some embodiments, the 7SK promoter comprises a nucleotide sequence that is at least 90%, 91%, 92%, 93%, 94%, 95%, 96%, 97%, 98%, 99% or 100% identical to the sequence of SEQ ID NO. 704:

| | |
|---|---|
| tgacggcgcg ccctgcagta tttagcatgc cccacccatc tgcaaggcat tctggatagt | 60 |
| gtcaaaacag ccggaaatca agtccgttta tctcaaactt tagcattttg ggaataaatg | 120 |
| atatttgcta tgctggttaa attagatttt agttaaattt cctgctgaag ctctagtacg | 180 |
| ataagtaact tgacctaagt gtaaagttga gatttccttc aggtttatat agcttgtgcg | 240 |
| ccgcctgggt a | 251 |

[0425] In some embodiments, the U6 promoter is a hU6c promoter and comprises a nucleotide sequence that is at least 90%, 91%, 92%, 93%, 94%, 95%, 96%, 97%, 98%, 99% or 100% identical to the sequence of SEQ ID NO: 705:

GAGGGCCTATTTCCCATGATTCCTTCATATTTGCATATACGATACAAGG
CTGTTAGAGAGATAATTGGAATTAATTTGACTGTAAACACAAAGATATT
AGTACAAAATACGTGACGTAGAAAGTAATAATTTCTTGGGTAGTTTGCA
GTTTTAAAATTATGTTTTAAAATGGACTATCATATGCTTACCGTAACTT
GAAAGTATTTCGATTTCTTGGCTTTATATATCTTGTGGAAAGGACGAAA
CACC.

[0426] In some embodiments, the U6 promoter is a variant of the hU6c promoter. In some embodiments, the variant of the hU6c promoter comprises alternative nucleotides as compared to the sequence of SEQ ID NO: 705. In some embodiments, the variant of the hU6c promoter comprises fewer nucleotides as compared to the 249 nucleotides of SEQ ID NO: 705. In some embodiments, the variant of the hU6c promoter has fewer nucleotides in the nucleosome binding sequence of the hU6c promoter of SEQ ID NO: 705. In some embodiments, the variant of the hU6c promoter lacks all of or at least a portion of (e.g., at least 5, 10, 15, 20, 25, or 30 nucleotides) the nucleotides corresponding to nucleotides 96-125 of SEQ ID NO: 705. In some embodiments, the variant of the hU6c promoter lacks all of or at least a portion of (e.g., at least 5, 10, 15, 20, 25, 30, 35, 40, 45, 50, 55, or 60 nucleotides) the nucleotides corresponding to nucleotides 81-140 of SEQ ID NO: 705. In some embodiments, the variant of the hU6c promoter lacks all of or at least a portion of (e.g., at least 10, 20, 30, 40, 50, 60, 65, 70, 75, 80, or 85 nucleotides) the nucleotides corresponding to nucleotides 66-150 of SEQ ID NO: 705. In some embodiments, the variant of the hU6c promoter lacks all of or at least a portion of (e.g., at least 10, 20, 30, 40, 50, 60, 70, 80, 90, 100, 110, or 120 nucleotides) the nucleotides corresponding to nucleotides 51-170 of SEQ ID NO: 705. In some embodiments, the variant of the hU6c promoter lacks the nucleotides corresponding to nucleotides 96-125 of SEQ ID NO: 705. In some embodiments, the variant of the hU6c promoter comprises 129-219 nucleotides. In some embodiments, the variant of the hU6c promoter comprises 219 nucleotides. In some embodiments, the variant of the hU6c promoter comprises 189 nucleotides. In some embodiments, the variant of the hU6c promoter comprises 159 nucleotides. In some embodiments, the variant of the hU6c promoter comprises 129 nucleotides.

[0427] In some embodiments, the U6 promoter is hU6d30 and comprises a nucleotide sequence that is at least 90%, 91%, 92%, 93%, 94%, 95%, 96%, 97%, 98%, 99% or 100% identical to the sequence of SEQ ID NO: 9001:

GAGGGCCTATTTCCCATGATTCCTTCATATTTGCATATACGATACAAGG
CTGTTAGAGAGATAATTGGAATTAATTTGACTGTAAACACAAAGATATA
ATTTCTTGGGTAGTTTGCAGTTTTAAAATTATGTTTTAAAATGGACTAT
CATATGCTTACCGTAACTTGAAAGTATTTCGATTTCTTGGCTTTATATA
TCTTGTGGAAAGGACGAAACACC.

[0428] In some embodiments, the U6 promoter is hU6d60 and comprises a nucleotide sequence that is at least 90%, 91%, 92%, 93%, 94%, 95%, 96%, 97%, 98%, 99% or 100% identical to the sequence of SEQ ID NO: 9002:

GAGGGCCTATTTCCCATGATTCCTTCATATTTGCATATACGATACAAGG
CTGTTAGAGAGATAATTGGAATTAATTTGACGTTTGCAGTTTTAAAATT
ATGTTTTAAAATGGACTATCATATGCTTACCGTAACTTGAAAGTATTTC
GATTTCTTGGCTTTATATATCTTGTGGAAAGGACGAAACACC.

[0429] In some embodiments, the U6 promoter is hU6d90 and comprises a nucleotide sequence that is at least 90%, 91%, 92%, 93%, 94%, 95%, 96%, 97%, 98%, 99% or 100% identical to the sequence of SEQ ID NO: 9003:

GAGGGCCTATTTCCCATGATTCCTTCATATTTGCATATACGATACAAGG
CTGTTAGAGAGATAATATTATGTTTTAAAATGGACTATCATATGCTTAC
CGTAACTTGAAAGTATTTCGATTTCTTGGCTTTATATATCTTGTGGAAA
GGACGAAACACC.

[0430] In some embodiments, the U6 promoter is hU6d120 and comprises a nucleotide sequence that is at least 90%, 91%, 92%, 93%, 94%, 95%, 96%, 97%, 98%, 99% or 100% identical to the sequence of SEQ ID NO: 9004:

GAGGGCCTATTTCCCATGATTCCTTCATATTTGCATATACGATACAAGG
CGGACTATCATATGCTTACCGTAACTTGAAAGTATTTCGATTTCTTGGC
TTTATATATCTTGTGGAAAGGACGAAACACC.

[0431] In some embodiments, the 7SK promoter is a 7SK2 promoter and comprises a nucleotide sequence that is at least 90%, 91%, 92%, 93%, 94%, 95%, 96%, 97%, 98%, 99% or 100% identical to the sequence of SEQ ID NO: 706:

CTGCAGTATTTAGCATGCCCCACCCATCTGCAAGGCATTCTGGATAGTG
TCAAAACAGCCGGAAATCAAGTCCGTTTATCTCAAACTTTAGCATTTTG
GGAATAAATGATATTTGCTATGCTGGTTAAATTAGATTTTAGTTAAATT
TCCTGCTGAAGCTCTAGTACGATAAGCAACTTGACCTAAGTGTAAAGTT
GAGACTTCCTTCAGGTTTATATAGCTTGTGCGCCGCTTGGGTACCTC.

[0432] In some embodiments, the 7SK promoter is a variant of the 7SK2 promoter. In some embodiments, the variant of the 7SK2 promoter comprises alternative nucleotides as compared to the sequence of SEQ ID NO: 706. In some embodiments, the variant of the 7SK2 promoter e.g., comprises fewer nucleotides as compared to the 243 nucleotides of SEQ ID NO: 706. In some embodiments, the variant of the 7SK2 promoter has fewer nucleotides in the nucleosome binding sequence of the 7SK2 promoter of SEQ ID NO: 706. In some embodiments, the variant of the 7SK2 promoter lacks all of or at least a portion of (e.g., at least 5, 10, 15, 20, 25, or 30 nucleotides) the nucleotides corresponding to nucleotides 95-124 of SEQ ID NO: 706. In some embodiments, the variant of the 7SK2 promoter lacks all of or at least a portion of (e.g., at least 5, 10, 15, 20, 25, 30, 35, 40, 45, 50, 55, or 60 nucleotides) the nucleotides corresponding to nucleotides 81-140 of SEQ ID NO: 706. In some embodiments, the variant of the 7SK2 promoter lacks all of or at least a portion of (e.g., at least 10, 20, 30, 40, 50, 60, 65, 70, 75, 80, 85 or 90 nucleotides) the nucleotides corresponding to nucleotides 67-156 of SEQ ID NO: 706. In some embodiments, the variant of the 7SK2 promoter lacks all of or at least a portion of (e.g., at least 10, 20, 30, 40, 50, 60, 70, 80, 90, 100, 110, or 120 nucleotides) the nucleotides corresponding to nucleotides 52-171 of SEQ ID NO: 706. In some embodiments, the variant of the 7SK2 promoter comprises 123-213 nucleotides. In some embodiments, the variant of the 7SK2 promoter comprises 213 nucleotides. In some embodiments, the variant of the 7SK2 promoter comprises 183 nucleotides. In some embodiments, the variant of the 7SK2 promoter comprises 153 nucleotides. In some embodiments, the variant of the 7SK2 promoter comprises 123 nucleotides.

[0433] In some embodiments, the 7SK promoter is 7SKd30 and comprises a nucleotide sequence that is at least 90%, 91%, 92%, 93%, 94%, 95%, 96%, 97%, 98%, 99% or 100% identical to the sequence of SEQ ID NO: 9006:

CTGCAGTATTTAGCATGCCCCACCCATCTGCAAGGCATTCTGGATAGTG
TCAAAACAGCCGGAAATCAAGTCCGTTTATCTCAAACTTTAGCATTTAA
ATTAGATTTTAGTTAAATTTCCTGCTGAAGCTCTAGTACGATAAGCAAC
TTGACCTAAGTGTAAAGTTGAGACTTCCTTCAGGTTTATATAGCTTGTG
CGCCGCTTGGGTACCTC.

[0434] In some embodiments, the 7SK promoter is 7SKd60 and comprises a nucleotide sequence that is at least 90%, 91%, 92%, 93%, 94%, 95%, 96%, 97%, 98%, 99% or 100% identical to the sequence of SEQ ID NO: 9007:

CTGCAGTATTTAGCATGCCCCACCCATCTGCAAGGCATTCTGGATAGTG
TCAAAACAGCCGGAAATCAAGTCCGTTTATCTTAAATTTCCTGCTGAAG
CTCTAGTACGATAAGCAACTTGACCTAAGTGTAAAGTTGAGACTTCCTT
CAGGTTTATATAGCTTGTGCGCCGCTTGGGTACCTC.

[0435] In some embodiments, the 7SK promoter is 7SKd90 and comprises a nucleotide sequence that is at least 90%, 91%, 92%, 93%, 94%, 95%, 96%, 97%, 98%, 99% or 100% identical to the sequence of SEQ ID NO: 9008:

CTGCAGTATTTAGCATGCCCCACCCATCTGCAAGGCATTCTGGATAGTG
TCAAAACAGCCGGAAATAGCTCTAGTACGATAAGCAACTTGACCTAAGT
GTAAAGTTGAGACTTCCTTCAGGTTTATATAGCTTGTGCGCCGCTTGGG
TACCTC.

[0436] In some embodiments, the 7SK promoter is 7SKd120 and comprises a nucleotide sequence that is at least 90%, 91%, 92%, 93%, 94%, 95%, 96%, 97%, 98%, 99% or 100% identical to the sequence of SEQ ID NO: 9009:

CTGCAGTATTTAGCATGCCCCACCCATCTGCAAGGCATTCTGGATAGTG
TCAGCAACTTGACCTAAGTGTAAAGTTGAGACTTCCTTCAGGTTTATAT
AGCTTGTGCGCCGCTTGGGTACCTC.

[0437] In some embodiments, the H1 promoter is a H1m or mH1 promoter and comprises a nucleotide sequence that is at least 90%, 91%, 92%, 93%, 94%, 95%, 96%, 97%, 98%, 99% or 100% identical to the sequence of SEQ ID NO: 707:

AATATTTGCATGTCGCTATGTGTTCTGGGAAATCACCATAAACGTGAAA
TGTCTTTGGATTTGGGAATCTTATAAGTTCTGTATGAGACCACTCTTTC
CC.

[0438] In some embodiments, the Ck8e promoter comprises a nucleotide sequence that is at least 90%, 91%, 92%, 93%, 94%, 95%, 96%, 97%, 98%, 99% or 100% identical to the sequence of SEQ ID NO: 701

TGCCCATGTAAGGAGGCAAGGCCTGGGGACACCCGAGATGCCTGGTTAT
AATTAACCCAGACATGTGGCTGCCCCCCCCCCCCCAACACCTGCTGCCT
CTAAAAATAACCCTGCATGCCATGTTCCCGGCGAAGGGCCAGCTGTCCC
CCGCCAGCTAGACTCAGCACTTAGTTTAGGAACCAGTGAGCAAGTCAGC
CCTTGGGGCAGCCCATACAAGGCCATGGGGCTGGGCAAGCTGCACGCCT
GGGTCCGGGGTGGGCACGGTGCCCGGGCAACGAGCTGAAAGCTCATCTG
CTCTCAGGGGCCCCTCCCTGGGGACAGCCCCTCCTGGCTAGTCACACCC
TGTAGGCTCCTCTATATAACCCAGGGGCACAGGGGCTGCCCTCATTCTA
CCACCACCTCCACAGCACAGACAGACACTCAGGAGCCAGCCAGC.

[0439] In some embodiments, the vector comprises multiple inverted terminal repeats (ITRs). These ITRs may be of an AAV1, AAV2, AAV3, AAV4, AAVS, AAV6, AAV7, AAV8, or AAV9 serotype. In some embodiments, the ITRs are of an AAV2 serotype. In some embodiments, the 5′ ITR comprises a sequence that is at least 80%, 85%, 90%, 91%, 92%, 93%, 94%, 95%, 96%, 97%, 98%, 99%, or 100% identical to the sequence of SEQ ID NO: 709:

GGCCACTCCCTCTCTGCGCGCTCGCTCGCTCACTGAGGCCGGGCGACCA
AAGGTCGCCCGACGCCCGGGCTTTGCCCGGGCGGCCTCAGTGAGCGAGC
GAGCGCGCAGAGAGGGAGTGGCCAACTCCATCACTAGGGGTTCCT.

[0440] In some embodiments, the 3′ITR comprises a sequence that is at least 80%, 85%, 90%, 91%, 92%, 93%, 94%, 95%, 96%, 97%, 98%, 99%, or 100% identical to the sequence of SEQ ID NO: 710:

AGGAACCCCTAGTGATGGAGTTGGCCACTCCCTCTCTGCGCGCTCGCTC
GCTCACTGAGGCCGGGCGACCAAAGGTCGCCCGACGCCCGGGCTTTGCC
CGGGCGGCCTCAGTGAGCGAGCGAGCGCGCAGAGAGGGA.

[0441] In some embodiments, a vector comprising a single nucleic acid molecule encoding 1) one or more guide RNA comprising any one or more of the spacer sequences of SEQ ID Nos: 1-35, 100-225, 1000-1078, 2000-2116, 3000-3069, or 4000-4251; and 2) a SaCas9 (for SEQ ID Nos: 1-35, 1000-1078, and 3000-3069) or SluCas9 (for SEQ ID NO: 100-225, 2000-2116, and 4000-4251) is provided. In some embodiments, the vector is an AAV vector. In some embodiments, the AAV vector is administered to a subject to treat DMD. In some embodiments, only one vector is needed due to the use of a particular guide sequence that is useful in the context of SaCas9 or SluCas9.

[0442] In some embodiments, the vector comprises a nucleic acid encoding a Cas9 protein (e.g., an SaCas9 or SluCas9 protein) and further comprises a nucleic acid encoding one or more single guide RNA(s). In some embodiments, the nucleic acid encoding the Cas9 protein is under the control of a CK8e promoter. In some embodiments, the nucleic acid encoding the guide RNA sequence is under the control of a hU6c promoter. In some embodiments, the vector is AAV9.

[0443] In some embodiments, the vector comprises multiple nucleic acids encoding more than one guide RNA. In some embodiments, the vector comprises two nucleic acids encoding two guide RNA sequences.

[0444] In some embodiments, the vector comprises a nucleic acid encoding a Cas9 protein (e.g., an SaCas9 protein or SluCas9 protein), a nucleic acid encoding a first guide RNA, and a nucleic acid encoding a second guide RNA. In some embodiments, the vector does not comprise a nucleic acid encoding more than two guide RNAs. In some embodiments, the nucleic acid encoding the first guide RNA is the same as the nucleic acid encoding the second guide RNA. In some embodiments, the nucleic acid encoding the first guide RNA is different from the nucleic acid encoding the second guide RNA. In some embodiments, the vector comprises a single nucleic acid molecule, wherein the single nucleic acid molecule comprises a nucleic acid encoding a Cas9 protein, a nucleic acid encoding a first guide RNA, and a nucleic acid that is the reverse complement to the coding sequence for the second guide RNA. In some embodiments, the vector comprises a single nucleic acid molecule, wherein the single nucleic acid molecule comprises a nucleic acid encoding a Cas9 protein, a nucleic acid that is the reverse complement to the coding sequence for the first guide RNA, and a nucleic acid that is the reverse complement to the coding sequence for the second guide RNA. In some embodiments, the nucleic acid encoding a Cas9 protein (e.g., an SaCas9 or SluCas9 protein) is under the control of the CK8e promoter. In some embodiments, the first guide is under the control of the 7SK2 promoter, and the second guide is under the control of the H1m promoter. In some embodiments, the first guide is under the control of the H1m promoter, and the second guide is under the control of the 7SK2 promoter. In some embodiments, the first guide is under the control of the hU6c promoter, and the second guide is under the control of the H1m promoter. In some embodiments, the first guide is under the control of the H1m promoter, and the second guide is under the control of the hU6c promoter. In some embodiments, the nucleic acid encoding the Cas9 protein is: a) between the nucleic acids encoding the guide RNAs, b) between the nucleic acids that are the reverse complement to the coding sequences for the guide RNAs, c) between the nucleic acid encoding the first guide RNA and the nucleic acid that is the reverse complement to the coding sequence for the second guide RNA, d) between the nucleic acid encoding the second guide RNA and the nucleic acid that is the reverse complement to the coding sequence for the first guide RNA, e) 5′ to the nucleic acids encoding the guide RNAs, f) 5′ to the nucleic acids that are the reverse complements to the coding sequences for the guide RNAs, g) 5′ to a nucleic acid encoding one of the guide RNAs and 5′ to a nucleic acid that is the reverse complement to the coding sequence for the other guide RNA, h) 3′ to the nucleic acids encoding the guide RNAs, i) 3′ to the nucleic acids that are the reverse complements to the coding sequences for the guide RNAs, or j) 3′ to a nucleic acid encoding one of the guide RNAs and 3′ to a nucleic acid that is the reverse complement to the coding sequence for the other guide RNA. In some embodiments, any of the vectors disclosed herein is AAV9. In preferred embodiments, the AAV9 vector is less than 5 kb from ITR to ITR in size, inclusive of both ITRs. In particular embodiments, the AAV9 vector is less than 4.9 kb from ITR to ITR in size, inclusive of both ITRs. In further embodiments, the AAV9 vector is less than 4.85 kb from ITR to ITR in size, inclusive of both ITRs. In further embodiments, the AAV9 vector is less than 4.8 kb from ITR to ITR in size, inclusive of both ITRs. In further embodiments, the AAV9 vector is less than 4.75 kb from ITR to ITR in size, inclusive of both ITRs. In further embodiments, the AAV9 vector is less than 4.7 kb from ITR to ITR in size, inclusive of both ITRs. In some embodiments, the vector is between 3.9-5 kb, 4-5 kb, 4.2-5 kb, 4.4-5 kb, 4.6-5 kb, 4.7-5 kb, 3.9-4.9 kb, 4.2-4.9 kb, 4.4-4.9 kb, 4.7-4.9 kb, 3.9-4.85 kb, 4.2-4.85 kb, 4.4-4.85 kb, 4.6-4.85 kb, 4.7-4.85 kb, 4.7-4.9 kb, 3.9-4.8 kb, 4.2-4.8 kb, 4.4-4.8 kb or 4.6-4.8 kb from ITR to ITR in size, inclusive of both ITRs. In some embodiments, the vector is between 4.4-4.85 kb from ITR to ITR in size, inclusive of both ITRs. In some embodiments, the vector is an AAV9 vector.

[0445] In some embodiments, any of the vectors disclosed herein comprises a nucleic acid encoding at least a first guide RNA and a second guide RNA. In some embodiments, the nucleic acid comprises a spacer-encoding sequence for the first guide RNA, a scaffold-encoding sequence for the first guide RNA, a spacer-encoding sequence for the second guide RNA, and a scaffold-encoding sequence of the second guide RNA. In some embodiments, the spacer-encoding sequence (e.g., encoding any of the spacer sequences disclosed herein) for the first guide RNA is identical to the spacer-encoding sequence for the second guide RNA. In some embodiments, the spacer-encoding sequence (e.g., encoding any of the spacer sequences disclosed herein) for the first guide RNA is different from the spacer-encoding sequence for the second guide RNA. In some embodiments, the scaffold-encoding sequence for the first guide RNA is identical to the scaffold-encoding sequence for the second guide RNA. In some embodiments, the scaffold-encoding sequence for the first guide RNA is different from the scaffold-encoding sequence for the nucleic acid encoding the second guide RNA. In some embodiments, the scaffold-encoding sequence for the first guide RNA comprises a sequence selected from the group consisting of SEQ ID Nos: 901-916, and the scaffold-encoding sequence for the second guide RNA comprises a different sequence selected from the group consisting of SEQ ID Nos: 901-916. In some embodiments, the scaffold-encoding sequence for the first guide RNA comprises the sequence of SEQ ID NO: 901, and the scaffold-encoding sequence for the second guide RNA comprises the sequence of SEQ ID NO: 902. In some embodiments, the scaffold-encoding sequence for the first guide RNA comprises the sequence of SEQ ID NO: 901, and the scaffold-encoding sequence for the second guide RNA comprises the sequence of SEQ ID NO: 903. In some embodiments, the scaffold-encoding sequence for the first guide RNA comprises the sequence of SEQ ID NO: 901, and the scaffold-encoding sequence for the second guide RNA comprises the sequence of SEQ ID NO: 904. In some embodiments, the scaffold-encoding sequence for the first guide RNA comprises the sequence of SEQ ID NO: 901, and the scaffold-encoding sequence for the second guide RNA comprises the sequence of SEQ ID NO: 905. In some embodiments, the scaffold-encoding sequence for the first guide RNA comprises the sequence of SEQ ID NO: 901, and the scaffold-encoding sequence for the second guide RNA comprises the sequence of SEQ ID NO: 906. In some embodiments, the scaffold-encoding sequence for the first guide RNA comprises the sequence of SEQ ID NO: 901, and the scaffold-encoding sequence for the second guide RNA comprises the sequence of SEQ ID NO: 907. In some embodiments, the scaffold-encoding sequence for the first guide RNA comprises the sequence of SEQ ID NO: 901, and the scaffold-encoding sequence for the second guide RNA comprises the sequence of SEQ ID NO: 908. In some embodiments, the scaffold-encoding sequence for the first guide RNA comprises the sequence of SEQ ID NO: 901, and the scaffold-encoding sequence for the second guide RNA comprises the sequence of SEQ ID NO: 909. In some embodiments, the scaffold-encoding sequence for the first guide RNA comprises the sequence of SEQ ID NO: 901, and the scaffold-encoding sequence for the second guide RNA comprises the sequence of SEQ ID NO: 910. In some embodiments, the scaffold-encoding sequence for the first guide RNA comprises the sequence of SEQ ID NO: 901, and the scaffold-encoding sequence for the second guide RNA comprises the sequence of SEQ ID NO: 911. In some embodiments, the scaffold-encoding sequence for the first guide RNA comprises the sequence of SEQ ID NO: 901, and the scaffold-encoding sequence for the second guide RNA comprises the sequence of SEQ ID NO: 912. In some embodiments, the scaffold-encoding sequence for the first guide RNA comprises the sequence of SEQ ID NO: 901, and the scaffold-encoding sequence for the second guide RNA comprises the sequence of SEQ ID NO: 913. In some embodiments, the scaffold-encoding sequence for the first guide RNA comprises the sequence of SEQ ID NO: 901, and the scaffold-encoding sequence for the second guide RNA comprises the sequence of SEQ ID NO: 914. In some embodiments, the scaffold-encoding sequence for the first guide RNA comprises the sequence of SEQ ID NO: 901, and the scaffold-encoding sequence for the second guide RNA comprises the sequence of SEQ ID NO: 915. In some embodiments, the scaffold-encoding sequence for the first guide RNA comprises the sequence of SEQ ID NO: 901, and the scaffold-encoding sequence for the second guide RNA comprises the sequence of SEQ ID NO: 916. In some embodiments, the spacer encoding sequence for the first guide RNA is the same as the spacer-encoding sequence in the second guide RNA, and the scaffold-encoding sequence for the first guide RNA is different from the scaffold-encoding sequence in the nucleic acid encoding the second guide RNA.

The disclosure provides for novel AAV vector configurations. Some examples of these novel AAV vector configurations are provided herein, and the order of elements in these exemplary vectors are referenced in a 5′ to 3′ manner with respect to the plus strand. For these configurations, it should be understood that the recited elements may not be directly contiguous, and that one or more nucleotides or one or more additional elements may be present between the recited elements. However, in some embodiments, it is possible that no nucleotides or no additional elements are present between the recited elements. Also, unless otherwise stated, “a promoter for expression of element X” means that the promoter is oriented in a manner to facilitate expression of the recited element X. In addition, unless otherwise stated, references to an “sgRNA scaffold sequence” or “a guide RNA scaffold sequence” are synonymous with “a nucleotide sequence/nucleic acid encoding an sgRNA scaffold sequence” or “a nucleotide sequence/nucleic acid encoding a guide RNA scaffold sequence.” In some embodiments, the disclosure provides for a nucleic acid encoding an SaCas9 (e.g., an SaCas9-KKH) or SluCas9. In some embodiments, the nucleic acid encodes for one or more nuclear localization signals (e.g., the SV40 NLS and/or the c-Myc NLS) on the C-terminus of the encoded SaCas9 or SluCas9. In some embodiments, the nucleic acid encodes for one or more NLSs (e.g., the SV40 NLS and/or the c-Myc NLS) on the C-terminus of the encoded SaCas9 or SluCas9, and the nucleic acid does not encode for an NLS on the N-terminus of the encoded SaCas9 or SluCas9. In some embodiments, the nucleic acid encodes for one or more nuclear localization signals (e.g., the SV40 NLS and/or the c-Myc NLS) on the N-terminus of the encoded SaCas9 or SluCas9. In some embodiments, the nucleic acid encodes for one or more NLSs (e.g., the SV40 NLS and/or the c-Myc NLS) on the N-terminus of the encoded SaCas9 or SluCas9, and the nucleic acid does not encode for an NLS on the C-terminus of the encoded SaCas9 or SluCas9. In some embodiments, the nucleic acid encodes for one or more nuclear localization signals (e.g., the SV40 NLS and/or the c-Myc NLS) on the C-terminus of the encoded SaCas9 or SluCas9 and also encodes for one or more NLSs on the N-terminus of the encoded SaCas9 or SluCas9 (e.g., the SV40 NLS and/or the c-Myc NLS). In some embodiments, the nucleic acid encodes one NLS. In some embodiments, the nucleic acid encodes two NLSs. In some embodiments, the nucleic acid encodes three NLSs. The one, two, or three NLS may all be C-terminal, N-terminal, or any combination of C- and N-terminal. The NLS may be fused/attached directly to the C- or N-terminus or to another NLS, or may be fused/attached indirectly attached through a linker. In some embodiments, an additional domain may be: a) fused to the N- or C-terminus of the Cas protein (e.g., a Cas9 protein), b) fused to the N-terminus of an NLS fused to the N-terminus of a Cas protein, or c) fused to the C-terminus of an NLS fused to the C-terminus of a Cas protein, with or without a linker. In some embodiments, an NLS is fused to the N- and/or C-terminus of the Cas protein by means of a linker. In some embodiments, an NLS is fused to the N-terminus of an N-terminally-fused NLS on a Cas protein by means of a linker, and/or an NLS is fused to the C-terminus of a C-terminally fused NLS on a Cas protein by means of a linker. In some embodiments, the linker is GSVD (SEQ ID NO: 550) or GSGS (SEQ ID NO: 551). In some embodiments, the Cas protein comprises a c-Myc NLS fused to the N-terminus of the Cas protein (or to an N-terminally-fused NLS on the Cas protein), optionally by means of a linker. In some embodiments, the Cas protein comprises an SV40 NLS fused to the C-terminus of the Cas protein (or to a C-terminally-fused NLS on the Cas protein), optionally by means of a linker. In some embodiments, the Cas protein comprises a nucleoplasmin NLS fused to the C-terminus of the Cas protein (or to a C-terminally-fused NLS on the Cas protein), optionally by means of a linker. In some embodiments, the Cas protein comprises: a) a c-Myc NLS fused to the N-terminus of the Cas protein, optionally by means of a linker, b) an SV40 NLS fused to the C-terminus of the Cas protein, optionally by means of a linker, and c) a nucleoplasmin NLS fused to the C-terminus of the SV40 NLS, optionally by means of a linker. In some embodiments, the Cas protein comprises: a) a c-Myc NLS fused to the N-terminus of the Cas protein, optionally by means of a linker, b) a nucleoplasmin NLS fused to the C-terminus of the Cas protein, optionally by means of a linker, and c) an SV40 NLS fused to the C-terminus of the nucleoplasmin NLS, optionally by means of a linker.

[0446] In some embodiments, the AAV vector comprises from 5′ to 3′ with respect to the plus strand: the reverse complement of a first sgRNA scaffold sequence, the reverse complement of a nucleic acid encoding a first sgRNA guide sequence, the reverse complement of a promoter for expression of the nucleic acid encoding the first sgRNA, a promoter for expression of a nucleic acid encoding SaCas9 (e.g., CK8e), a nucleic acid encoding SaCas9, a polyadenylation sequence, a promoter for expression of a second sgRNA, a second sgRNA guide sequence, and a second sgRNA scaffold sequence. In some embodiments the promoter for expression of the nucleic acid encoding the first sgRNA is any of the hU6c promoters disclosed herein. In some embodiments the promoter for expression of the nucleic acid encoding the first sgRNA comprises SEQ ID NO: 705. In some embodiments the promoter for expression of the nucleic acid encoding the first sgRNA comprises SEQ ID NO: 9001. In some embodiments the promoter for expression of the nucleic acid encoding the first sgRNA comprises SEQ ID NO: 9002. In some embodiments the promoter for expression of the nucleic acid encoding the first sgRNA comprises SEQ ID NO: 9003. In some embodiments the promoter for expression of the nucleic acid encoding the first sgRNA comprises SEQ ID NO: 9004. In some embodiments the promoter for expression of the nucleic acid encoding the first sgRNA is any of the 7SK2 promoters disclosed herein. In some embodiments the promoter for expression of the nucleic acid encoding the first sgRNA comprises SEQ ID NO: 705. In some embodiments the promoter for expression of the nucleic acid encoding the first sgRNA comprises SEQ ID NO: 9006. In some embodiments the promoter for expression of the nucleic acid encoding the first sgRNA comprises SEQ ID NO: 9007. In some embodiments the promoter for expression of the nucleic acid encoding the first sgRNA comprises SEQ ID NO: 9008. In some embodiments the promoter for expression of the nucleic acid encoding the first sgRNA comprises SEQ ID NO: 9009. In some embodiments the promoter for expression of the nucleic acid encoding the second sgRNA is any of the hU6c promoters disclosed herein. In some embodiments the promoter for expression of the nucleic acid encoding the second sgRNA comprises SEQ ID NO: 705. In some embodiments the promoter for expression of the nucleic acid encoding the second sgRNA comprises SEQ ID NO: 9001. In some embodiments the promoter for expression of the nucleic acid encoding the second sgRNA comprises SEQ ID NO: 9002. In some embodiments the promoter for expression of the nucleic acid encoding the second sgRNA comprises SEQ ID NO: 9003. In some embodiments the promoter for expression of the nucleic acid encoding the second sgRNA comprises SEQ ID NO: 9004. In some embodiments the promoter for expression of the nucleic acid encoding the second sgRNA is any of the 7SK2 promoters disclosed herein. In some embodiments the promoter for expression of the nucleic acid encoding the second sgRNA comprises SEQ ID NO: 705. In some embodiments the promoter for expression of the nucleic acid encoding the second sgRNA comprises SEQ ID NO: 9006. In some embodiments the promoter for expression of the nucleic acid encoding the second sgRNA comprises SEQ ID NO: 9007. In some embodiments the promoter for expression of the nucleic acid encoding the second sgRNA comprises SEQ ID NO: 9008. In some embodiments the promoter for expression of the nucleic acid encoding the second sgRNA comprises SEQ ID NO: 9009. In some embodiments the promoter for expression of the nucleic acid encoding the second sgRNA is any of the H1m promoters disclosed herein. In some embodiments, the promoter for SaCas9 is the CK8e promoter. In some embodiments, the nucleic acid sequence encoding SaCas9 is fused to a nucleic acid sequence encoding a nuclear localization sequence (NLS). In some embodiments, the nucleic acid sequence encoding SaCas9 is fused to two nucleic acid sequences each encoding a nuclear localization sequence (NLS). In some embodiments, the nucleic acid sequence encoding SaCas9 is fused to three nucleic acid sequences each encoding a nuclear localization sequence (NLS). In some embodiments, the one or more NLSs is an SV40 NLS. In some embodiments, the one or more NLSs is a c-Myc NLS. In some embodiments, the NLS is fused to the SaCas9 with a linker.

[0447] In some embodiments, the AAV vector comprises from 5′ to 3′ with respect to the plus strand: the reverse complement of a first sgRNA scaffold sequence, the reverse complement of a nucleic acid encoding a first sgRNA guide sequence, the reverse complement of an hU6c promoter for expression of the nucleic acid encoding the first sgRNA, a promoter for expression of a nucleic acid encoding SaCas9 (e.g., CK8e), a nucleic acid encoding SaCas9, a polyadenylation sequence, an hU6c promoter for expression of a second sgRNA, a second sgRNA guide sequence, and a second sgRNA scaffold sequence. In some embodiments, the first sgRNA and the second sgRNA comprise the sequences of SEQ ID NOs: 10 and 15. In some embodiments, the first sgRNA and the second sgRNA comprise the sequences of SEQ ID NOs: 10 and 16. In some embodiments, the first sgRNA and the second sgRNA comprise the sequences of SEQ ID NOs: 12 and 16. In some embodiments, the first sgRNA and the second sgRNA comprise the sequences of SEQ ID NOs: 1001 and 1005. In some embodiments, the first sgRNA and the second sgRNA comprise the sequences of SEQ ID NOs: 1001 and 15. In some embodiments, the first sgRNA and the second sgRNA comprise the sequences of SEQ ID NOs: 1001 and 16. In some embodiments, the first sgRNA and the second sgRNA comprise the sequences of SEQ ID NOs: 1003 and 1005. In some embodiments, the first sgRNA and the second sgRNA comprise the sequences of SEQ ID NOs: 16 and 1003. In some embodiments, the first sgRNA and the second sgRNA comprise the sequences of SEQ ID NOs: 12 and 1010. In some embodiments, the first sgRNA and the second sgRNA comprise the sequences of SEQ ID NOs: 12 and 1012. In some embodiments, the first sgRNA and the second sgRNA comprise the sequences of SEQ ID NOs: 12 and 1013. In some embodiments, the first sgRNA and the second sgRNA comprise the sequences of SEQ ID NOs: 10 and 1016. In some embodiments, the first sgRNA and the second sgRNA comprise the sequences of SEQ ID NOs: 1017 and 16. In some embodiments, the first sgRNA and the second sgRNA comprise the sequences of SEQ ID NOs: 1018 and 16. In some embodiments, the first sgRNA and the second sgRNA comprise the sequences of SEQ ID NOs: 15 and 10. In some embodiments, the first sgRNA and the second sgRNA comprise the sequences of SEQ ID NOs: 16 and 10. In some embodiments, the first sgRNA and the second sgRNA comprise the sequences of SEQ ID NOs: 16 and 12. In some embodiments, the first sgRNA and the second sgRNA comprise the sequences of SEQ ID NOs: 1005 and 1001. In some embodiments, the first sgRNA and the second sgRNA comprise the sequences of SEQ ID NOs: 15 and 1001. In some embodiments, the first sgRNA and the second sgRNA comprise the sequences of SEQ ID NOs: 16 and 1001. In some embodiments, the first sgRNA and the second sgRNA comprise the sequences of SEQ ID NOs: 1005 and 1003. In some embodiments, the first sgRNA and the second sgRNA comprise the sequences of SEQ ID NOs: 1003 and 16. In some embodiments, the first sgRNA and the second sgRNA comprise the sequences of SEQ ID NOs: 1010 and 12. In some embodiments, the first sgRNA and the second sgRNA comprise the sequences of SEQ ID NOs: 1012 and 12. In some embodiments, the first sgRNA and the second sgRNA comprise the sequences of SEQ ID NOs: 1013 and 12. In some embodiments, the first sgRNA and the second sgRNA comprise the sequences of SEQ ID NOs: 1016 and 10. In some embodiments, the first sgRNA and the second sgRNA comprise the sequences of SEQ ID NOs: 16 and 1017. In some embodiments, the first sgRNA and the second sgRNA comprise the sequences of SEQ ID NOs: 16 and 1018. In some embodiments, the nucleic acid sequence encoding SaCas9 is fused to a nucleic acid sequence encoding a nuclear localization sequence (NLS). In some embodiments, the nucleic acid sequence encoding SaCas9 is fused to two nucleic acid sequences each encoding a nuclear localization sequence (NLS). In some embodiments, the nucleic acid sequence encoding SaCas9 is fused to three nucleic acid sequences each encoding a nuclear localization sequence (NLS). In some embodiments, the one or more NLSs is an SV40 NLS. In some embodiments, the one or more NLSs is a c-Myc NLS. In some embodiments, the NLS is fused to the SaCas9 with a linker.

[0448] In some embodiments, the AAV vector comprises from 5′ to 3′ with respect to the plus strand: the reverse complement of a first sgRNA scaffold sequence, the reverse complement of a nucleic acid encoding a first sgRNA guide sequence, the reverse complement of an hU6c promoter for expression of the nucleic acid encoding the first sgRNA, a promoter for expression of a nucleic acid encoding SaCas9 (e.g., CK8e), a nucleic acid encoding SaCas9, a polyadenylation sequence, an 7SK promoter for expression of a second sgRNA, a second sgRNA guide sequence, and a second sgRNA scaffold sequence. In some embodiments, the first sgRNA and the second sgRNA comprise the sequences of SEQ ID NOs: 10 and 15. In some embodiments, the first sgRNA and the second sgRNA comprise the sequences of SEQ ID NOs: 10 and 16. In some embodiments, the first sgRNA and the second sgRNA comprise the sequences of SEQ ID NOs: 12 and 16. In some embodiments, the first sgRNA and the second sgRNA comprise the sequences of SEQ ID NOs: 1001 and 1005. In some embodiments, the first sgRNA and the second sgRNA comprise the sequences of SEQ ID NOs: 1001 and 15. In some embodiments, the first sgRNA and the second sgRNA comprise the sequences of SEQ ID NOs: 1001 and 16. In some embodiments, the first sgRNA and the second sgRNA comprise the sequences of SEQ ID NOs: 1003 and 1005. In some embodiments, the first sgRNA and the second sgRNA comprise the sequences of SEQ ID NOs: 16 and 1003. In some embodiments, the first sgRNA and the second sgRNA comprise the sequences of SEQ ID NOs: 12 and 1010. In some embodiments, the first sgRNA and the second sgRNA comprise the sequences of SEQ ID NOs: 12 and 1012. In some embodiments, the first sgRNA and the second sgRNA comprise the sequences of SEQ ID NOs: 12 and 1013. In some embodiments, the first sgRNA and the second sgRNA comprise the sequences of SEQ ID NOs: 10 and 1016. In some embodiments, the first sgRNA and the second sgRNA comprise the sequences of SEQ ID NOs: 1017 and 16. In some embodiments, the first sgRNA and the second sgRNA comprise the sequences of SEQ ID NOs: 1018 and 16. In some embodiments, the first sgRNA and the second sgRNA comprise the sequences of SEQ ID NOs: 15 and 10. In some embodiments, the first sgRNA and the second sgRNA comprise the sequences of SEQ ID NOs: 16 and 10. In some embodiments, the first sgRNA and the second sgRNA comprise the sequences of SEQ ID NOs: 16 and 12. In some embodiments, the first sgRNA and the second sgRNA comprise the sequences of SEQ ID NOs: 1005 and 1001. In some embodiments, the first sgRNA and the second sgRNA comprise the sequences of SEQ ID NOs: 15 and 1001. In some embodiments, the first sgRNA and the second sgRNA comprise the sequences of SEQ ID NOs: 16 and 1001. In some embodiments, the first sgRNA and the second sgRNA comprise the sequences of SEQ ID NOs: 1005 and 1003. In some embodiments, the first sgRNA and the second sgRNA comprise the sequences of SEQ ID NOs: 1003 and 16. In some embodiments, the first sgRNA and the second sgRNA comprise the sequences of SEQ ID NOs: 1010 and 12. In some embodiments, the first sgRNA and the second sgRNA comprise the sequences of SEQ ID NOs: 1012 and 12. In some embodiments, the first sgRNA and the second sgRNA comprise the sequences of SEQ ID NOs: 1013 and 12. In some embodiments, the first sgRNA and the second sgRNA comprise the sequences of SEQ ID NOs: 1016 and 10. In some embodiments, the first sgRNA and the second sgRNA comprise the sequences of SEQ ID NOs: 16 and 1017. In some embodiments, the first sgRNA and the second sgRNA comprise the sequences of SEQ ID NOs: 16 and 1018. In some embodiments, the nucleic acid sequence encoding SaCas9 is fused to a nucleic acid sequence encoding a nuclear localization sequence (NLS). In some embodiments, the nucleic acid sequence encoding SaCas9 is fused to two nucleic acid sequences each encoding a nuclear localization sequence (NLS). In some embodiments, the nucleic acid sequence encoding SaCas9 is fused to three nucleic acid sequences each encoding a nuclear localization sequence (NLS). In some embodiments, the one or more NLSs is an SV40 NLS. In some embodiments, the one or more NLSs is a c-Myc NLS. In some embodiments, the NLS is fused to the SaCas9 with a linker.

[0449] In some embodiments, the AAV vector comprises from 5′ to 3′ with respect to the plus strand: the reverse complement of a first sgRNA scaffold sequence, the reverse complement of a nucleic acid encoding a first sgRNA guide sequence, the reverse complement of an hU6c promoter for expression of the nucleic acid encoding the first sgRNA, a promoter for expression of a nucleic acid encoding SaCas9 (e.g., CK8e), a nucleic acid encoding SaCas9, a polyadenylation sequence, an H1m promoter for expression of a second sgRNA, a second sgRNA guide sequence, and a second sgRNA scaffold sequence. In some embodiments, the first sgRNA and the second sgRNA comprise the sequences of SEQ ID NOs: 10 and 15. In some embodiments, the first sgRNA and the second sgRNA comprise the sequences of SEQ ID NOs: 10 and 16. In some embodiments, the first sgRNA and the second sgRNA comprise the sequences of SEQ ID NOs: 12 and 16. In some embodiments, the first sgRNA and the second sgRNA comprise the sequences of SEQ ID NOs: 1001 and 1005. In some embodiments, the first sgRNA and the second sgRNA comprise the sequences of SEQ ID NOs: 1001 and 15. In some embodiments, the first sgRNA and the second sgRNA comprise the sequences of SEQ ID NOs: 1001 and 16. In some embodiments, the first sgRNA and the second sgRNA comprise the sequences of SEQ ID NOs: 1003 and 1005. In some embodiments, the first sgRNA and the second sgRNA comprise the sequences of SEQ ID NOs: 16 and 1003. In some embodiments, the first sgRNA and the second sgRNA comprise the sequences of SEQ ID NOs: 12 and 1010. In some embodiments, the first sgRNA and the second sgRNA comprise the sequences of SEQ ID NOs: 12 and 1012. In some embodiments, the first sgRNA and the second sgRNA comprise the sequences of SEQ ID NOs: 12 and 1013. In some embodiments, the first sgRNA and the second sgRNA comprise the sequences of SEQ ID NOs: 10 and 1016. In some embodiments, the first sgRNA and the second sgRNA comprise the sequences of SEQ ID NOs: 1017 and 16. In some embodiments, the first sgRNA and the second sgRNA comprise the sequences of SEQ ID NOs: 1018 and 16. In some embodiments, the first sgRNA and the second sgRNA comprise the sequences of SEQ ID NOs: 15 and 10. In some embodiments, the first sgRNA and the second sgRNA comprise the sequences of SEQ ID NOs: 16 and 10. In some embodiments, the first sgRNA and the second sgRNA comprise the sequences of SEQ ID NOs: 16 and 12. In some embodiments, the first sgRNA and the second sgRNA comprise the sequences of SEQ ID NOs: 1005 and 1001. In some embodiments, the first sgRNA and the second sgRNA comprise the sequences of SEQ ID NOs: 15 and 1001. In some embodiments, the first sgRNA and the second sgRNA comprise the sequences of SEQ ID NOs: 16 and 1001. In some embodiments, the first sgRNA and the second sgRNA comprise the sequences of SEQ ID NOs: 1005 and 1003. In some embodiments, the first sgRNA and the second sgRNA comprise the sequences of SEQ ID NOs: 1003 and 16. In some embodiments, the first sgRNA and the second sgRNA comprise the sequences of SEQ ID NOs: 1010 and 12. In some embodiments, the first sgRNA and the second sgRNA comprise the sequences of SEQ ID NOs: 1012 and 12. In some embodiments, the first sgRNA and the second sgRNA comprise the sequences of SEQ ID NOs: 1013 and 12. In some embodiments, the first sgRNA and the second sgRNA comprise the sequences of SEQ ID NOs: 1016 and 10. In some embodiments, the first sgRNA and the second sgRNA comprise the sequences of SEQ ID NOs: 16 and 1017. In some embodiments, the first sgRNA and the second sgRNA comprise the sequences of SEQ ID NOs: 16 and 1018. In some embodiments, the nucleic acid sequence encoding SaCas9 is fused to a nucleic acid sequence encoding a nuclear localization sequence (NLS). In some embodiments, the nucleic acid sequence encoding SaCas9 is fused to two nucleic acid sequences each encoding a nuclear localization sequence (NLS). In some embodiments, the nucleic acid sequence encoding SaCas9 is fused to three nucleic acid sequences each encoding a nuclear localization sequence (NLS). In some embodiments, the one or more NLSs is an SV40 NLS. In some embodiments, the one or more NLSs is a c-Myc NLS. In some embodiments, the NLS is fused to the SaCas9 with a linker.

[0450] In some embodiments, the AAV vector comprises from 5′ to 3′ with respect to the plus strand: the reverse complement of a first sgRNA scaffold sequence, the reverse complement of a nucleic acid encoding a first sgRNA guide sequence, the reverse complement of an 7SK promoter for expression of the nucleic acid encoding the first sgRNA, a promoter for expression of a nucleic acid encoding SaCas9 (e.g., CK8e), a nucleic acid encoding SaCas9, a polyadenylation sequence, an H1m promoter for expression of a second sgRNA, a second sgRNA guide sequence, and a second sgRNA scaffold sequence. In some embodiments, the first sgRNA and the second sgRNA comprise the sequences of SEQ ID NOs: 10 and 15. In some embodiments, the first sgRNA and the second sgRNA comprise the sequences of SEQ ID NOs: 10 and 16. In some embodiments, the first sgRNA and the second sgRNA comprise the sequences of SEQ ID NOs: 12 and 16. In some embodiments, the first sgRNA and the second sgRNA comprise the sequences of SEQ ID NOs: 1001 and 1005. In some embodiments, the first sgRNA and the second sgRNA comprise the sequences of SEQ ID NOs: 1001 and 15. In some embodiments, the first sgRNA and the second sgRNA comprise the sequences of SEQ ID NOs: 1001 and 16. In some embodiments, the first sgRNA and the second sgRNA comprise the sequences of SEQ ID NOs: 1003 and 1005. In some embodiments, the first sgRNA and the second sgRNA comprise the sequences of SEQ ID NOs: 16 and 1003. In some embodiments, the first sgRNA and the second sgRNA comprise the sequences of SEQ ID NOs: 12 and 1010. In some embodiments, the first sgRNA and the second sgRNA comprise the sequences of SEQ ID NOs: 12 and 1012. In some embodiments, the first sgRNA and the second sgRNA comprise the sequences of SEQ ID NOs: 12 and 1013. In some embodiments, the first sgRNA and the second sgRNA comprise the sequences of SEQ ID NOs: 10 and 1016. In some embodiments, the first sgRNA and the second sgRNA comprise the sequences of SEQ ID NOs: 1017 and 16. In some embodiments, the first sgRNA and the second sgRNA comprise the sequences of SEQ ID NOs: 1018 and 16. In some embodiments, the first sgRNA and the second sgRNA comprise the sequences of SEQ ID NOs: 15 and 10. In some embodiments, the first sgRNA and the second sgRNA comprise the sequences of SEQ ID NOs: 16 and 10. In some embodiments, the first sgRNA and the second sgRNA comprise the sequences of SEQ ID NOs: 16 and 12. In some embodiments, the first sgRNA and the second sgRNA comprise the sequences of SEQ ID NOs: 1005 and 1001. In some embodiments, the first sgRNA and the second sgRNA comprise the sequences of SEQ ID NOs: 15 and 1001. In some embodiments, the first sgRNA and the second sgRNA comprise the sequences of SEQ ID NOs: 16 and 1001. In some embodiments, the first sgRNA and the second sgRNA comprise the sequences of SEQ ID NOs: 1005 and 1003. In some embodiments, the first sgRNA and the second sgRNA comprise the sequences of SEQ ID NOs: 1003 and 16. In some embodiments, the first sgRNA and the second sgRNA comprise the sequences of SEQ ID NOs: 1010 and 12. In some embodiments, the first sgRNA and the second sgRNA comprise the sequences of SEQ ID NOs: 1012 and 12. In some embodiments, the first sgRNA and the second sgRNA comprise the sequences of SEQ ID NOs: 1013 and 12. In some embodiments, the first sgRNA and the second sgRNA comprise the sequences of SEQ ID NOs: 1016 and 10. In some embodiments, the first sgRNA and the second sgRNA comprise the sequences of SEQ ID NOs: 16 and 1017. In some embodiments, the first sgRNA and the second sgRNA comprise the sequences of SEQ ID NOs: 16 and 1018. In some embodiments, the nucleic acid sequence encoding SaCas9 is fused to a nucleic acid sequence encoding a nuclear localization sequence (NLS). In some embodiments, the nucleic acid sequence encoding SaCas9 is fused to two nucleic acid sequences each encoding a nuclear localization sequence (NLS). In some embodiments, the nucleic acid sequence encoding SaCas9 is fused to three nucleic acid sequences each encoding a nuclear localization sequence (NLS). In some embodiments, the one or more NLSs is an SV40 NLS. In some embodiments, the one or more NLSs is a c-Myc NLS. In some embodiments, the NLS is fused to the SaCas9 with a linker.

[0451] In some embodiments, the AAV vector comprises from 5′ to 3′ with respect to the plus strand: the reverse complement of a first sgRNA scaffold sequence, the reverse complement of a nucleic acid encoding a first sgRNA guide sequence, the reverse complement of an hU6c promoter for expression of the nucleic acid encoding the first sgRNA, a promoter for expression of a nucleic acid encoding SaCas9 (e.g., CK8e), a nucleic acid encoding SaCas9-KKH (e.g., a sequence that is at least 85%, 90%, 91%, 92%, 93%, 94%, 95%, 96%, 97%, 98%, 99% or 100% identical to SEQ ID NO: 715 or functional fragments thereof), a polyadenylation sequence, an hU6c promoter for expression of a second sgRNA, a second sgRNA guide sequence, and a second sgRNA scaffold sequence. In some embodiments, the first sgRNA and the second sgRNA comprise the sequences of SEQ ID NOs: 1001 and 1005. In some embodiments, the first sgRNA and the second sgRNA comprise the sequences of SEQ ID NOs: 1001 and 15. In some embodiments, the first sgRNA and the second sgRNA comprise the sequences of SEQ ID NOs: 1001 and 16. In some embodiments, the first sgRNA and the second sgRNA comprise the sequences of SEQ ID NOs: 1003 and 1005. In some embodiments, the first sgRNA and the second sgRNA comprise the sequences of SEQ ID NOs: 16 and 1003. In some embodiments, the first sgRNA and the second sgRNA comprise the sequences of SEQ ID NOs: 12 and 1010. In some embodiments, the first sgRNA and the second sgRNA comprise the sequences of SEQ ID NOs: 12 and 1012. In some embodiments, the first sgRNA and the second sgRNA comprise the sequences of SEQ ID NOs: 12 and 1013. In some embodiments, the first sgRNA and the second sgRNA comprise the sequences of SEQ ID NOs: 10 and 1016. In some embodiments, the first sgRNA and the second sgRNA comprise the sequences of SEQ ID NOs: 1017 and 16. In some embodiments, the first sgRNA and the second sgRNA comprise the sequences of SEQ ID NOs: 1018 and 16. In some embodiments, the first sgRNA and the second sgRNA comprise the sequences of SEQ ID NOs: 1005 and 1001. In some embodiments, the first sgRNA and the second sgRNA comprise the sequences of SEQ ID NOs: 15 and 1001. In some embodiments, the first sgRNA and the second sgRNA comprise the sequences of SEQ ID NOs: 16 and 1001. In some embodiments, the first sgRNA and the second sgRNA comprise the sequences of SEQ ID NOs: 1005 and 1003. In some embodiments, the first sgRNA and the second sgRNA comprise the sequences of SEQ ID NOs: 1003 and 16. In some embodiments, the first sgRNA and the second sgRNA comprise the sequences of SEQ ID NOs: 1010 and 12. In some embodiments, the first sgRNA and the second sgRNA comprise the sequences of SEQ ID NOs: 1012 and 12. In some embodiments, the first sgRNA and the second sgRNA comprise the sequences of SEQ ID NOs: 1013 and 12. In some embodiments, the first sgRNA and the second sgRNA comprise the sequences of SEQ ID NOs: 1016 and 10. In some embodiments, the first sgRNA and the second sgRNA comprise the sequences of SEQ ID NOs: 16 and 1017. In some embodiments, the first sgRNA and the second sgRNA comprise the sequences of SEQ ID NOs: 16 and 1018. In some embodiments, the nucleic acid sequence encoding SaCas9 is fused to a nucleic acid sequence encoding a nuclear localization sequence (NLS). In some embodiments, the nucleic acid sequence encoding SaCas9 is fused to two nucleic acid sequences each encoding a nuclear localization sequence (NLS). In some embodiments, the nucleic acid sequence encoding SaCas9 is fused to three nucleic acid sequences each encoding a nuclear localization sequence (NLS). In some embodiments, the one or more NLSs is an SV40 NLS. In some embodiments, the one or more NLSs is a c-Myc NLS. In some embodiments, the NLS is fused to the SaCas9 with a linker.

[0452] In some embodiments, the AAV vector comprises from 5′ to 3′ with respect to the plus strand: the reverse complement of a first sgRNA scaffold sequence, the reverse complement of a nucleic acid encoding a first sgRNA guide sequence, the reverse complement of an hU6c promoter for expression of the nucleic acid encoding the first sgRNA, a promoter for expression of a nucleic acid encoding SaCas9 (e.g., CK8e), a nucleic acid encoding SaCas9-KKH (e.g., a sequence that is at least 85%, 90%, 91%, 92%, 93%, 94%, 95%, 96%, 97%, 98%, 99% or 100% identical to SEQ ID NO: 715 or functional fragments thereof), a polyadenylation sequence, an 7SK promoter for expression of a second sgRNA, a second sgRNA guide sequence, and a second sgRNA scaffold sequence. In some embodiments, the first sgRNA and the second sgRNA comprise the sequences of SEQ ID NOs: 1001 and 1005. In some embodiments, the first sgRNA and the second sgRNA comprise the sequences of SEQ ID NOs: 1001 and 15. In some embodiments, the first sgRNA and the second sgRNA comprise the sequences of SEQ ID NOs: 1001 and 16. In some embodiments, the first sgRNA and the second sgRNA comprise the sequences of SEQ ID NOs: 1003 and 1005. In some embodiments, the first sgRNA and the second sgRNA comprise the sequences of SEQ ID NOs: 16 and 1003. In some embodiments, the first sgRNA and the second sgRNA comprise the sequences of SEQ ID NOs: 12 and 1010. In some embodiments, the first sgRNA and the second sgRNA comprise the sequences of SEQ ID NOs: 12 and 1012. In some embodiments, the first sgRNA and the second sgRNA comprise the sequences of SEQ ID NOs: 12 and 1013. In some embodiments, the first sgRNA and the second sgRNA comprise the sequences of SEQ ID NOs: 10 and 1016. In some embodiments, the first sgRNA and the second sgRNA comprise the sequences of SEQ ID NOs: 1017 and 16. In some embodiments, the first sgRNA and the second sgRNA comprise the sequences of SEQ ID NOs: 1018 and 16. In some embodiments, the first sgRNA and the second sgRNA comprise the sequences of SEQ ID NOs: 1005 and 1001. In some embodiments, the first sgRNA and the second sgRNA comprise the sequences of SEQ ID NOs: 15 and 1001. In some embodiments, the first sgRNA and the second sgRNA comprise the sequences of SEQ ID NOs: 16 and 1001. In some embodiments, the first sgRNA and the second sgRNA comprise the sequences of SEQ ID NOs: 1005 and 1003. In some embodiments, the first sgRNA and the second sgRNA comprise the sequences of SEQ ID NOs: 1003 and 16. In some embodiments, the first sgRNA and the second sgRNA comprise the sequences of SEQ ID NOs: 1010 and 12. In some embodiments, the first sgRNA and the second sgRNA comprise the sequences of SEQ ID NOs: 1012 and 12. In some embodiments, the first sgRNA and the second sgRNA comprise the sequences of SEQ ID NOs: 1013 and 12. In some embodiments, the first sgRNA and the second sgRNA comprise the sequences of SEQ ID NOs: 1016 and 10. In some embodiments, the first sgRNA and the second sgRNA comprise the sequences of SEQ ID NOs: 16 and 1017. In some embodiments, the first sgRNA and the second sgRNA comprise the sequences of SEQ ID NOs: 16 and 1018. In some embodiments, the nucleic acid sequence encoding SaCas9 is fused to a nucleic acid sequence encoding a nuclear localization sequence (NLS). In some embodiments, the nucleic acid sequence encoding SaCas9 is fused to two nucleic acid sequences each encoding a nuclear localization sequence (NLS). In some embodiments, the nucleic acid sequence encoding SaCas9 is fused to three nucleic acid sequences each encoding a nuclear localization sequence (NLS). In some embodiments, the one or more NLSs is an SV40 NLS. In some embodiments, the one or more NLSs is a c-Myc NLS. In some embodiments, the NLS is fused to the SaCas9 with a linker.

[0453] In some embodiments, the AAV vector comprises from 5′ to 3′ with respect to the plus strand: the reverse complement of a first sgRNA scaffold sequence, the reverse complement of a nucleic acid encoding a first sgRNA guide sequence, the reverse complement of an hU6c promoter for expression of the nucleic acid encoding the first sgRNA, a promoter for expression of a nucleic acid encoding SaCas9 (e.g., CK8e), a nucleic acid encoding SaCas9-KKH (e.g., a sequence that is at least 85%, 90%, 91%, 92%, 93%, 94%, 95%, 96%, 97%, 98%, 99% or 100% identical to SEQ ID NO: 715 or functional fragments thereof), a polyadenylation sequence, an H1m promoter for expression of a second sgRNA, a second sgRNA guide sequence, and a second sgRNA scaffold sequence. In some embodiments, the first sgRNA and the second sgRNA comprise the sequences of SEQ ID NOs: 1001 and 1005. In some embodiments, the first sgRNA and the second sgRNA comprise the sequences of SEQ ID NOs: 1001 and 15. In some embodiments, the first sgRNA and the second sgRNA comprise the sequences of SEQ ID NOs: 1001 and 16. In some embodiments, the first sgRNA and the second sgRNA comprise the sequences of SEQ ID NOs: 1003 and 1005. In some embodiments, the first sgRNA and the second sgRNA comprise the sequences of SEQ ID NOs: 16 and 1003. In some embodiments, the first sgRNA and the second sgRNA comprise the sequences of SEQ ID NOs: 12 and 1010. In some embodiments, the first sgRNA and the second sgRNA comprise the sequences of SEQ ID NOs: 12 and 1012. In some embodiments, the first sgRNA and the second sgRNA comprise the sequences of SEQ ID NOs: 12 and 1013. In some embodiments, the first sgRNA and the second sgRNA comprise the sequences of SEQ ID NOs: 10 and 1016. In some embodiments, the first sgRNA and the second sgRNA comprise the sequences of SEQ ID NOs: 1017 and 16. In some embodiments, the first sgRNA and the second sgRNA comprise the sequences of SEQ ID NOs: 1018 and 16. In some embodiments, the first sgRNA and the second sgRNA comprise the sequences of SEQ ID NOs: 1005 and 1001. In some embodiments, the first sgRNA and the second sgRNA comprise the sequences of SEQ ID NOs: 15 and 1001. In some embodiments, the first sgRNA and the second sgRNA comprise the sequences of SEQ ID NOs: 16 and 1001. In some embodiments, the first sgRNA and the second sgRNA comprise the sequences of SEQ ID NOs: 1005 and 1003. In some embodiments, the first sgRNA and the second sgRNA comprise the sequences of SEQ ID NOs: 1003 and 16. In some embodiments, the first sgRNA and the second sgRNA comprise the sequences of SEQ ID NOs: 1010 and 12. In some embodiments, the first sgRNA and the second sgRNA comprise the sequences of SEQ ID NOs: 1012 and 12. In some embodiments, the first sgRNA and the second sgRNA comprise the sequences of SEQ ID NOs: 1013 and 12. In some embodiments, the first sgRNA and the second sgRNA comprise the sequences of SEQ ID NOs: 1016 and 10. In some embodiments, the first sgRNA and the second sgRNA comprise the sequences of SEQ ID NOs: 16 and 1017. In some embodiments, the first sgRNA and the second sgRNA comprise the sequences of SEQ ID NOs: 16 and 1018. In some embodiments, the nucleic acid sequence encoding SaCas9 is fused to a nucleic acid sequence encoding a nuclear localization sequence (NLS). In some embodiments, the nucleic acid sequence encoding SaCas9 is fused to two nucleic acid sequences each encoding a nuclear localization sequence (NLS). In some embodiments, the nucleic acid sequence encoding SaCas9 is fused to three nucleic acid sequences each encoding a nuclear localization sequence (NLS). In some embodiments, the one or more NLSs is an SV40 NLS. In some embodiments, the one or more NLSs is a c-Myc NLS. In some embodiments, the NLS is fused to the SaCas9 with a linker.

[0454] In some embodiments, the AAV vector comprises from 5′ to 3′ with respect to the plus strand: the reverse complement of a first sgRNA scaffold sequence, the reverse complement of a nucleic acid encoding a first sgRNA guide sequence, the reverse complement of an 7SK promoter for expression of the nucleic acid encoding the first sgRNA, a promoter for expression of a nucleic acid encoding SaCas9 (e.g., CK8e), a nucleic acid encoding SaCas9-KKH (e.g., a sequence that is at least 85%, 90%, 91%, 92%, 93%, 94%, 95%, 96%, 97%, 98%, 99% or 100% identical to SEQ ID NO: 715 or functional fragments thereof), a polyadenylation sequence, an H1m promoter for expression of a second sgRNA, a second sgRNA guide sequence, and a second sgRNA scaffold sequence. In some embodiments, the first sgRNA and the second sgRNA comprise the sequences of SEQ ID NOs: 1001 and 1005. In some embodiments, the first sgRNA and the second sgRNA comprise the sequences of SEQ ID NOs: 1001 and 15. In some embodiments, the first sgRNA and the second sgRNA comprise the sequences of SEQ ID NOs: 1001 and 16. In some embodiments, the first sgRNA and the second sgRNA comprise the sequences of SEQ ID NOs: 1003 and 1005. In some embodiments, the first sgRNA and the second sgRNA comprise the sequences of SEQ ID NOs: 16 and 1003. In some embodiments, the first sgRNA and the second sgRNA comprise the sequences of SEQ ID NOs: 12 and 1010. In some embodiments, the first sgRNA and the second sgRNA comprise the sequences of SEQ ID NOs: 12 and 1012. In some embodiments, the first sgRNA and the second sgRNA comprise the sequences of SEQ ID NOs: 12 and 1013. In some embodiments, the first sgRNA and the second sgRNA comprise the sequences of SEQ ID NOs: 10 and 1016. In some embodiments, the first sgRNA and the second sgRNA comprise the sequences of SEQ ID NOs: 1017 and 16. In some embodiments, the first sgRNA and the second sgRNA comprise the sequences of SEQ ID NOs: 1018 and 16. In some embodiments, the first sgRNA and the second sgRNA comprise the sequences of SEQ ID NOs: 1005 and 1001. In some embodiments, the first sgRNA and the second sgRNA comprise the sequences of SEQ ID NOs: 15 and 1001. In some embodiments, the first sgRNA and the second sgRNA comprise the sequences of SEQ ID NOs: 16 and 1001. In some embodiments, the first sgRNA and the second sgRNA comprise the sequences of SEQ ID NOs: 1005 and 1003. In some embodiments, the first sgRNA and the second sgRNA comprise the sequences of SEQ ID NOs: 1003 and 16. In some embodiments, the first sgRNA and the second sgRNA comprise the sequences of SEQ ID NOs: 1010 and 12. In some embodiments, the first sgRNA and the second sgRNA comprise the sequences of SEQ ID NOs: 1012 and 12. In some embodiments, the first sgRNA and the second sgRNA comprise the sequences of SEQ ID NOs: 1013 and 12. In some embodiments, the first sgRNA and the second sgRNA comprise the sequences of SEQ ID NOs: 1016 and 10. In some embodiments, the first sgRNA and the second sgRNA comprise the sequences of SEQ ID NOs: 16 and 1017. In some embodiments, the first sgRNA and the second sgRNA comprise the sequences of SEQ ID NOs: 16 and 1018. In some embodiments, the nucleic acid sequence encoding SaCas9 is fused to a nucleic acid sequence encoding a nuclear localization sequence (NLS). In some embodiments, the nucleic acid sequence encoding SaCas9 is fused to two nucleic acid sequences each encoding a nuclear localization sequence (NLS). In some embodiments, the nucleic acid sequence encoding SaCas9 is fused to three nucleic acid sequences each encoding a nuclear localization sequence (NLS). In some embodiments, the one or more NLSs is an SV40 NLS. In some embodiments, the one or more NLSs is a c-Myc NLS. In some embodiments, the NLS is fused to the SaCas9 with a linker.

[0455] In some embodiments, the AAV vector comprises from 5′ to 3′ with respect to the plus strand: the reverse complement of a first sgRNA scaffold sequence, the reverse complement of a nucleic acid encoding a first sgRNA guide sequence, the reverse complement of a promoter for expression of the nucleic acid encoding the first sgRNA, a promoter for expression of a nucleic acid encoding SluCas9 (e.g., CK8e), a nucleic acid encoding SluCas9, a polyadenylation sequence, a promoter for expression of a second sgRNA, a second sgRNA guide sequence, and a second sgRNA scaffold sequence. In some embodiments the promoter for expression of the nucleic acid encoding the first sgRNA is any of the hU6c promoters disclosed herein. In some embodiments the promoter for expression of the nucleic acid encoding the first sgRNA comprises SEQ ID NO: 705. In some embodiments the promoter for expression of the nucleic acid encoding the first sgRNA comprises SEQ ID NO: 9001. In some embodiments the promoter for expression of the nucleic acid encoding the first sgRNA comprises SEQ ID NO: 9002. In some embodiments the promoter for expression of the nucleic acid encoding the first sgRNA comprises SEQ ID NO: 9003. In some embodiments the promoter for expression of the nucleic acid encoding the first sgRNA comprises SEQ ID NO: 9004. In some embodiments the promoter for expression of the nucleic acid encoding the first sgRNA is any of the 7SK2 promoters disclosed herein. In some embodiments the promoter for expression of the nucleic acid encoding the first sgRNA comprises SEQ ID NO: 7005. In some embodiments the promoter for expression of the nucleic acid encoding the first sgRNA comprises SEQ ID NO: 9006. In some embodiments the promoter for expression of the nucleic acid encoding the first sgRNA comprises SEQ ID NO: 9007. In some embodiments the promoter for expression of the nucleic acid encoding the first sgRNA comprises SEQ ID NO: 9008. In some embodiments the promoter for expression of the nucleic acid encoding the first sgRNA comprises SEQ ID NO: 9009. In some embodiments the promoter for expression of the nucleic acid encoding the second sgRNA is any of the hU6c promoters disclosed herein. In some embodiments the promoter for expression of the nucleic acid encoding the second sgRNA comprises SEQ ID NO: 705. In some embodiments the promoter for expression of the nucleic acid encoding the second sgRNA comprises SEQ ID NO: 9001. In some embodiments the promoter for expression of the nucleic acid encoding the second sgRNA comprises SEQ ID NO: 9002. In some embodiments the promoter for expression of the nucleic acid encoding the second sgRNA comprises SEQ ID NO: 9003. In some embodiments the promoter for expression of the nucleic acid encoding the second sgRNA comprises SEQ ID NO: 9004. In some embodiments the promoter for expression of the nucleic acid encoding the second sgRNA is any of the 7SK2 promoters disclosed herein. In some embodiments the promoter for expression of the nucleic acid encoding the second sgRNA comprises SEQ ID NO: 705. In some embodiments the promoter for expression of the nucleic acid encoding the second sgRNA comprises SEQ ID NO: 9006. In some embodiments the promoter for expression of the nucleic acid encoding the second sgRNA comprises SEQ ID NO: 9007. In some embodiments the promoter for expression of the nucleic acid encoding the second sgRNA comprises SEQ ID NO: 9008. In some embodiments the promoter for expression of the nucleic acid encoding the second sgRNA comprises SEQ ID NO: 9009. In some embodiments the promoter for expression of the nucleic acid encoding the second sgRNA is any of the H1m promoters disclosed herein. In some embodiments, the promoter for SluCas9 is the CK8e promoter. In some embodiments, the nucleic acid sequence encoding SluCas9 is fused to a nucleic acid sequence encoding a nuclear localization sequence (NLS). In some embodiments, the nucleic acid sequence encoding SluCas9 is fused to two nucleic acid sequences each encoding a nuclear localization sequence (NLS). In some embodiments, the nucleic acid sequence encoding SluCas9 is fused to three nucleic acid sequences each encoding a nuclear localization sequence (NLS). In some embodiments, the one or more NLSs is an SV40 NLS. In some embodiments, the one or more NLSs is a c-Myc NLS. In some embodiments, the NLS is fused to the SluCas9 with a linker.

[0456] In some embodiments, the AAV vector comprises from 5′ to 3′ with respect to the plus strand: the reverse complement of a first sgRNA scaffold sequence, the reverse complement of a nucleic acid encoding a first sgRNA guide sequence, the reverse complement of an hU6c promoter for expression of the nucleic acid encoding the first sgRNA, a promoter for expression of a nucleic acid encoding SluCas9 (e.g., CK8e), a nucleic acid encoding SluCas9, a polyadenylation sequence, an hU6c promoter for expression of a second sgRNA, a second sgRNA guide sequence, and a second sgRNA scaffold sequence. In some embodiments, the first sgRNA and the second sgRNA comprise the sequences of SEQ ID NOs: 148 and 134. In some embodiments, the first sgRNA and the second sgRNA comprise the sequences of SEQ ID NOs: 149 and 135. In some embodiments, the first sgRNA and the second sgRNA comprise the sequences of SEQ ID NOs: 150 and 135. In some embodiments, the first sgRNA and the second sgRNA comprise the sequences of SEQ ID NOs: 131 and 136. In some embodiments, the first sgRNA and the second sgRNA comprise the sequences of SEQ ID NOs: 151 and 136. In some embodiments, the first sgRNA and the second sgRNA comprise the sequences of SEQ ID NOs: 139 and 131. In some embodiments, the first sgRNA and the second sgRNA comprise the sequences of SEQ ID NOs: 140 and 131. In some embodiments, the first sgRNA and the second sgRNA comprise the sequences of SEQ ID NOs: 140 and 151. In some embodiments, the first sgRNA and the second sgRNA comprise the sequences of SEQ ID NOs: 141 and 148. In some embodiments, the first sgRNA and the second sgRNA comprise the sequences of SEQ ID NOs: 144 and 149. In some embodiments, the first sgRNA and the second sgRNA comprise the sequences of SEQ ID NOs: 144 and 150. In some embodiments, the first sgRNA and the second sgRNA comprise the sequences of SEQ ID NOs: 145 and 131. In some embodiments, the first sgRNA and the second sgRNA comprise the sequences of SEQ ID NOs: 145 and 151. In some embodiments, the first sgRNA and the second sgRNA comprise the sequences of SEQ ID NOs: 146 and 148. In some embodiments, the first sgRNA and the second sgRNA comprise the sequences of SEQ ID NOs: 134 and 148. In some embodiments, the first sgRNA and the second sgRNA comprise the sequences of SEQ ID NOs: 135 and 149. In some embodiments, the first sgRNA and the second sgRNA comprise the sequences of SEQ ID NOs: 135 and 150. In some embodiments, the first sgRNA and the second sgRNA comprise the sequences of SEQ ID NOs: 136 and 131. In some embodiments, the first sgRNA and the second sgRNA comprise the sequences of SEQ ID NOs: 136 and 151. In some embodiments, the first sgRNA and the second sgRNA comprise the sequences of SEQ ID NOs: 131 and 139. In some embodiments, the first sgRNA and the second sgRNA comprise the sequences of SEQ ID NOs: 131 and 140. In some embodiments, the first sgRNA and the second sgRNA comprise the sequences of SEQ ID NOs: 151 and 140. In some embodiments, the first sgRNA and the second sgRNA comprise the sequences of SEQ ID NOs: 148 and 141. In some embodiments, the first sgRNA and the second sgRNA comprise the sequences of SEQ ID NOs: 149 and 144. In some embodiments, the first sgRNA and the second sgRNA comprise the sequences of SEQ ID NOs: 150 and 144. In some embodiments, the first sgRNA and the second sgRNA comprise the sequences of SEQ ID NOs: 131 and 145. In some embodiments, the first sgRNA and the second sgRNA comprise the sequences of SEQ ID NOs: 151 and 145. In some embodiments, the first sgRNA and the second sgRNA comprise the sequences of SEQ ID NOs: 148 and 146. In some embodiments, the nucleic acid sequence encoding SluCas9 is fused to a nucleic acid sequence encoding a nuclear localization sequence (NLS). In some embodiments, the nucleic acid sequence encoding SluCas9 is fused to two nucleic acid sequences each encoding a nuclear localization sequence (NLS). In some embodiments, the nucleic acid sequence encoding SluCas9 is fused to three nucleic acid sequences each encoding a nuclear localization sequence (NLS). In some embodiments, the one or more NLSs is an SV40 NLS. In some embodiments, the one or more NLSs is a c-Myc NLS. In some embodiments, the NLS is fused to the SluCas9 with a linker.

[0457] In some embodiments, the AAV vector comprises from 5′ to 3′ with respect to the plus strand: the reverse complement of a first sgRNA scaffold sequence, the reverse complement of a nucleic acid encoding a first sgRNA guide sequence, the reverse complement of an hU6c promoter for expression of the nucleic acid encoding the first sgRNA, a promoter for expression of a nucleic acid encoding SluCas9 (e.g., CK8e), a nucleic acid encoding SluCas9, a polyadenylation sequence, an 7SK promoter for expression of a second sgRNA, a second sgRNA guide sequence, and a second sgRNA scaffold sequence. In some embodiments, the first sgRNA and the second sgRNA comprise the sequences of SEQ ID NOs: 148 and 134. In some embodiments, the first sgRNA and the second sgRNA comprise the sequences of SEQ ID NOs: 149 and 135. In some embodiments, the first sgRNA and the second sgRNA comprise the sequences of SEQ ID NOs: 150 and 135. In some embodiments, the first sgRNA and the second sgRNA comprise the sequences of SEQ ID NOs: 131 and 136. In some embodiments, the first sgRNA and the second sgRNA comprise the sequences of SEQ ID NOs: 151 and 136. In some embodiments, the first sgRNA and the second sgRNA comprise the sequences of SEQ ID NOs: 139 and 131. In some embodiments, the first sgRNA and the second sgRNA comprise the sequences of SEQ ID NOs: 140 and 131. In some embodiments, the first sgRNA and the second sgRNA comprise the sequences of SEQ ID NOs: 140 and 151. In some embodiments, the first sgRNA and the second sgRNA comprise the sequences of SEQ ID NOs: 141 and 148. In some embodiments, the first sgRNA and the second sgRNA comprise the sequences of SEQ ID NOs: 144 and 149. In some embodiments, the first sgRNA and the second sgRNA comprise the sequences of SEQ ID NOs: 144 and 150. In some embodiments, the first sgRNA and the second sgRNA comprise the sequences of SEQ ID NOs: 145 and 131. In some embodiments, the first sgRNA and the second sgRNA comprise the sequences of SEQ ID NOs: 145 and 151. In some embodiments, the first sgRNA and the second sgRNA comprise the sequences of SEQ ID NOs: 146 and 148. In some embodiments, the first sgRNA and the second sgRNA comprise the sequences of SEQ ID NOs: 134 and 148. In some embodiments, the first sgRNA and the second sgRNA comprise the sequences of SEQ ID NOs: 135 and 149. In some embodiments, the first sgRNA and the second sgRNA comprise the sequences of SEQ ID NOs: 135 and 150. In some embodiments, the first sgRNA and the second sgRNA comprise the sequences of SEQ ID NOs: 136 and 131. In some embodiments, the first sgRNA and the second sgRNA comprise the sequences of SEQ ID NOs: 136 and 151. In some embodiments, the first sgRNA and the second sgRNA comprise the sequences of SEQ ID NOs: 131 and 139. In some embodiments, the first sgRNA and the second sgRNA comprise the sequences of SEQ ID NOs: 131 and 140. In some embodiments, the first sgRNA and the second sgRNA comprise the sequences of SEQ ID NOs: 151 and 140. In some embodiments, the first sgRNA and the second sgRNA comprise the sequences of SEQ ID NOs: 148 and 141. In some embodiments, the first sgRNA and the second sgRNA comprise the sequences of SEQ ID NOs: 149 and 144. In some embodiments, the first sgRNA and the second sgRNA comprise the sequences of SEQ ID NOs: 150 and 144. In some embodiments, the first sgRNA and the second sgRNA comprise the sequences of SEQ ID NOs: 131 and 145. In some embodiments, the first sgRNA and the second sgRNA comprise the sequences of SEQ ID NOs: 151 and 145. In some embodiments, the first sgRNA and the second sgRNA comprise the sequences of SEQ ID NOs: 148 and 146. In some embodiments, the nucleic acid sequence encoding SluCas9 is fused to a nucleic acid sequence encoding a nuclear localization sequence (NLS). In some embodiments, the nucleic acid sequence encoding SluCas9 is fused to two nucleic acid sequences each encoding a nuclear localization sequence (NLS). In some embodiments, the nucleic acid sequence encoding SluCas9 is fused to three nucleic acid sequences each encoding a nuclear localization sequence (NLS). In some embodiments, the one or more NLSs is an SV40 NLS. In some embodiments, the one or more NLSs is a c-Myc NLS. In some embodiments, the NLS is fused to the SluCas9 with a linker.

[0458] In some embodiments, the AAV vector comprises from 5′ to 3′ with respect to the plus strand: the reverse complement of a first sgRNA scaffold sequence, the reverse complement of a nucleic acid encoding a first sgRNA guide sequence, the reverse complement of an hU6c promoter for expression of the nucleic acid encoding the first sgRNA, a promoter for expression of a nucleic acid encoding SluCas9 (e.g., CK8e), a nucleic acid encoding SluCas9, a polyadenylation sequence, an H1m promoter for expression of a second sgRNA, a second sgRNA guide sequence, and a second sgRNA scaffold sequence. In some embodiments, the first sgRNA and the second sgRNA comprise the sequences of SEQ ID NOs: 148 and 134. In some embodiments, the first sgRNA and the second sgRNA comprise the sequences of SEQ ID NOs: 149 and 135. In some embodiments, the first sgRNA and the second sgRNA comprise the sequences of SEQ ID NOs: 150 and 135. In some embodiments, the first sgRNA and the second sgRNA comprise the sequences of SEQ ID NOs: 131 and 136. In some embodiments, the first sgRNA and the second sgRNA comprise the sequences of SEQ ID NOs: 151 and 136. In some embodiments, the first sgRNA and the second sgRNA comprise the sequences of SEQ ID NOs: 139 and 131. In some embodiments, the first sgRNA and the second sgRNA comprise the sequences of SEQ ID NOs: 140 and 131. In some embodiments, the first sgRNA and the second sgRNA comprise the sequences of SEQ ID NOs: 140 and 151. In some embodiments, the first sgRNA and the second sgRNA comprise the sequences of SEQ ID NOs: 141 and 148. In some embodiments, the first sgRNA and the second sgRNA comprise the sequences of SEQ ID NOs: 144 and 149. In some embodiments, the first sgRNA and the second sgRNA comprise the sequences of SEQ ID NOs: 144 and 150. In some embodiments, the first sgRNA and the second sgRNA comprise the sequences of SEQ ID NOs: 145 and 131. In some embodiments, the first sgRNA and the second sgRNA comprise the sequences of SEQ ID NOs: 145 and 151. In some embodiments, the first sgRNA and the second sgRNA comprise the sequences of SEQ ID NOs: 146 and 148. In some embodiments, the first sgRNA and the second sgRNA comprise the sequences of SEQ ID NOs: 134 and 148. In some embodiments, the first sgRNA and the second sgRNA comprise the sequences of SEQ ID NOs: 135 and 149. In some embodiments, the first sgRNA and the second sgRNA comprise the sequences of SEQ ID NOs: 135 and 150. In some embodiments, the first sgRNA and the second sgRNA comprise the sequences of SEQ ID NOs: 136 and 131. In some embodiments, the first sgRNA and the second sgRNA comprise the sequences of SEQ ID NOs: 136 and 151. In some embodiments, the first sgRNA and the second sgRNA comprise the sequences of SEQ ID NOs: 131 and 139. In some embodiments, the first sgRNA and the second sgRNA comprise the sequences of SEQ ID NOs: 131 and 140. In some embodiments, the first sgRNA and the second sgRNA comprise the sequences of SEQ ID NOs: 151 and 140. In some embodiments, the first sgRNA and the second sgRNA comprise the sequences of SEQ ID NOs: 148 and 141. In some embodiments, the first sgRNA and the second sgRNA comprise the sequences of SEQ ID NOs: 149 and 144. In some embodiments, the first sgRNA and the second sgRNA comprise the sequences of SEQ ID NOs: 150 and 144. In some embodiments, the first sgRNA and the second sgRNA comprise the sequences of SEQ ID NOs: 131 and 145. In some embodiments, the first sgRNA and the second sgRNA comprise the sequences of SEQ ID NOs: 151 and 145. In some embodiments, the first sgRNA and the second sgRNA comprise the sequences of SEQ ID NOs: 148 and 146. In some embodiments, the nucleic acid sequence encoding SluCas9 is fused to a nucleic acid sequence encoding a nuclear localization sequence (NLS). In some embodiments, the nucleic acid sequence encoding SluCas9 is fused to two nucleic acid sequences each encoding a nuclear localization sequence (NLS). In some embodiments, the nucleic acid sequence encoding SluCas9 is fused to three nucleic acid sequences each encoding a nuclear localization sequence (NLS). In some embodiments, the one or more NLSs is an SV40 NLS. In some embodiments, the one or more NLSs is a c-Myc NLS. In some embodiments, the NLS is fused to the SluCas9 with a linker.

[0459] In some embodiments, the AAV vector comprises from 5′ to 3′ with respect to the plus strand: the reverse complement of a first sgRNA scaffold sequence, the reverse complement of a nucleic acid encoding a first sgRNA guide sequence, the reverse complement of an 7SK promoter for expression of the nucleic acid encoding the first sgRNA, a promoter for expression of a nucleic acid encoding SluCas9 (e.g., CK8e), a nucleic acid encoding SluCas9, a polyadenylation sequence, an H1m promoter for expression of a second sgRNA, a second sgRNA guide sequence, and a second sgRNA scaffold sequence. In some embodiments, the first sgRNA and the second sgRNA comprise the sequences of SEQ ID NOs: 148 and 134. In some embodiments, the first sgRNA and the second sgRNA comprise the sequences of SEQ ID NOs: 149 and 135. In some embodiments, the first sgRNA and the second sgRNA comprise the sequences of SEQ ID NOs: 150 and 135. In some embodiments, the first sgRNA and the second sgRNA comprise the sequences of SEQ ID NOs: 131 and 136. In some embodiments, the first sgRNA and the second sgRNA comprise the sequences of SEQ ID NOs: 151 and 136. In some embodiments, the first sgRNA and the second sgRNA comprise the sequences of SEQ ID NOs: 139 and 131. In some embodiments, the first sgRNA and the second sgRNA comprise the sequences of SEQ ID NOs: 140 and 131. In some embodiments, the first sgRNA and the second sgRNA comprise the sequences of SEQ ID NOs: 140 and 151. In some embodiments, the first sgRNA and the second sgRNA comprise the sequences of SEQ ID NOs: 141 and 148. In some embodiments, the first sgRNA and the second sgRNA comprise the sequences of SEQ ID NOs: 144 and 149. In some embodiments, the first sgRNA and the second sgRNA comprise the sequences of SEQ ID NOs: 144 and 150. In some embodiments, the first sgRNA and the second sgRNA comprise the sequences of SEQ ID NOs: 145 and 131. In some embodiments, the first sgRNA and the second sgRNA comprise the sequences of SEQ ID NOs: 145 and 151. In some embodiments, the first sgRNA and the second sgRNA comprise the sequences of SEQ ID NOs: 146 and 148. In some embodiments, the first sgRNA and the second sgRNA comprise the sequences of SEQ ID NOs: 134 and 148. In some embodiments, the first sgRNA and the second sgRNA comprise the sequences of SEQ ID NOs: 135 and 149. In some embodiments, the first sgRNA and the second sgRNA comprise the sequences of SEQ ID NOs: 135 and 150. In some embodiments, the first sgRNA and the second sgRNA comprise the sequences of SEQ ID NOs: 136 and 131. In some embodiments, the first sgRNA and the second sgRNA comprise the sequences of SEQ ID NOs: 136 and 151. In some embodiments, the first sgRNA and the second sgRNA comprise the sequences of SEQ ID NOs: 131 and 139. In some embodiments, the first sgRNA and the second sgRNA comprise the sequences of SEQ ID NOs: 131 and 140. In some embodiments, the first sgRNA and the second sgRNA comprise the sequences of SEQ ID NOs: 151 and 140. In some embodiments, the first sgRNA and the second sgRNA comprise the sequences of SEQ ID NOs: 148 and 141. In some embodiments, the first sgRNA and the second sgRNA comprise the sequences of SEQ ID NOs: 149 and 144. In some embodiments, the first sgRNA and the second sgRNA comprise the sequences of SEQ ID NOs: 150 and 144. In some embodiments, the first sgRNA and the second sgRNA comprise the sequences of SEQ ID NOs: 131 and 145. In some embodiments, the first sgRNA and the second sgRNA comprise the sequences of SEQ ID NOs: 151 and 145. In some embodiments, the first sgRNA and the second sgRNA comprise the sequences of SEQ ID NOs: 148 and 146. In some embodiments, the nucleic acid sequence encoding SluCas9 is fused to a nucleic acid sequence encoding a nuclear localization sequence (NLS). In some embodiments, the nucleic acid sequence encoding SluCas9 is fused to two nucleic acid sequences each encoding a nuclear localization sequence (NLS). In some embodiments, the nucleic acid sequence encoding SluCas9 is fused to three nucleic acid sequences each encoding a nuclear localization sequence (NLS). In some embodiments, the one or more NLSs is an SV40 NLS. In some embodiments, the one or more NLSs is a c-Myc NLS. In some embodiments, the NLS is fused to the SluCas9 with a linker.

[0460] In some embodiments, the disclosure provides for a composition comprising at least two nucleic acids. In some embodiments, the composition comprises at least two nucleic acid molecules, wherein the first nucleic acid molecule comprises a sequence encoding any of the endonucleases disclosed herein (e.g., a SaCas9 or SluCas9), wherein the second nucleic acid molecule encodes a first guide RNA and a second guide RNA, wherein the first guide RNA and the second guide RNA are not the same sequence, and wherein the second nucleic acid molecule does not encode an endonuclease. In some embodiments, the first nucleic acid molecule also encodes a copy of the first guide RNA and a copy of the second guide RNA. In some embodiments, the first nucleic acid molecule does not encode any guide RNAs. In some embodiments, the second nucleic acid molecule encodes two copies of the first guide RNA and two copies of the second guide RNA. In some embodiments, the second nucleic molecule encodes two copies of the first guide RNA, and one copy of the second guide RNA. In some embodiments, the second nucleic acid molecule encodes one copy of the first guide RNA, and two copies of the second guide RNA. In some embodiments, the second nucleic acid molecule comprises two copies of the first guide RNA, and three copies of the second guide RNA. In some embodiments, the second nucleic acid molecule comprises three copies of the first guide RNA, and two copies of the second guide RNA. In some embodiments, the second nucleic acid molecule encodes three copies of the first guide RNA and three copies of the second guide RNA. In some embodiments, the first nucleic acid molecule comprises from 5′ to 3′ with respect to the plus strand: the reverse complement of a first guide RNA scaffold sequence, the reverse complement of a nucleotide sequence encoding the first guide RNA sequence, the reverse complement of a promoter for expression of the nucleotide sequence encoding the first guide RNA sequence, a promoter for expression of a nucleotide sequence encoding the endonuclease, a nucleotide sequence encoding an endonuclease, a polyadenylation sequence, a promoter for expression of the second guide RNA in the same direction as the promoter for the endonuclease, the second guide RNA sequence, and a second guide RNA scaffold sequence. In some embodiments, the promoter for expression of the nucleotide sequence encoding the first guide RNA sequence in the first nucleic acid molecule is a U6 promoter and the promoter for expression of the nucleotide sequence encoding the second guide RNA in the first nucleic acid molecule is a U6 promoter. In some embodiments, the first nucleic acid molecule encodes a Staphylococcus aureus Cas9 (SaCas9) endonuclease, and the first guide RNA comprises the first sequence and the second guide RNA comprises the second sequence from any one the following pairs of sequences: SEQ ID NOs: 10 and 15; 10 and 16; 12 and 16; 1001 and 1005; 1001 and 15; 1001 and 16; 1003 and 1005; 16 and 1003; 12 and 1010; 12 and 1012; 12 and 1013; 10 and 1016; 1017 and 1005; 1017 and 16; 1018 and 16; 15 and 10; 16 and 10; 16 and 12; 1005 and 1001; 15 and 1001; 16 and 1001; 1005 and 1003; 1003 and 16; 1010 and 12; 1012 and 12; 1013 and 12; 1016 and 10; 1005 and 1017; 16 and 1017; and 16 and 1018. In some embodiments, the first guide RNA comprises the sequence of SEQ ID NO: 12 and the second guide RNA comprises the sequence of SEQ ID NO: 1013. In some embodiments, the first guide RNA comprises the sequence of SEQ ID NO: 1013 and the second guide RNA comprises the sequence of SEQ ID NO: 12. In some embodiments, the first nucleic acid molecule encodes a Staphylococcus lugdunensis (SluCas9) endonuclease, and wherein the first guide RNA comprises the first sequence and the second guide RNAs comprises the second sequence from any one the following pairs of sequences: SEQ ID NOs: 148 and 134; 149 and 135; 150 and 135; 131 and 136; 151 and 136; 139 and 131; 139 and 151; 140 and 131; 140 and 151; 141 and 148; 144 and 149; 144 and 150; 145 and 131; 145 and 151; 146 and 148; 134 and 148; 135 and 149; 135 and 150; 136 and 131; 136 and 151; 131 and 139; 151 and 139; 131 and 140; 151 and 140; 148 and 141; 149 and 144; 150 and 144; 131 and 145; 151 and 145; and 148 and 146. In some embodiments, a) the first guide RNA comprises the sequence of SEQ ID NO: 148 and the second guide RNA comprises the sequence of SEQ ID NO: 134; b) the second guide RNA comprises the sequence of SEQ ID NO: 145 and the second guide RNA comprises the sequence of SEQ ID NO: 131, c) the first guide RNA comprises the sequence of SEQ ID NO: 134 and the second guide RNA comprises the sequence of SEQ ID NO: 148; d) the second guide RNA comprises the sequence of SEQ ID NO: 131 and the second guide RNA comprises the sequence of SEQ ID NO: 145.

[0461] In some embodiments, the first nucleic acid molecule is in a first vector (e.g., AAV9), and the second nucleic acid is in a separate second vector. In some embodiments, the first vector is AAV9. In some embodiments, the second vector is AAV9. In preferred embodiments, the AAV9 vector is less than 5 kb from ITR to ITR in size, inclusive of both ITRs. In particular embodiments, the AAV9 vector is less than 4.9 kb from ITR to ITR in size, inclusive of both ITRs. In further embodiments, the AAV9 vector is less than 4.85 kb from ITR to ITR in size, inclusive of both ITRs. In further embodiments, the AAV9 vector is less than 4.8 kb from ITR to ITR in size, inclusive of both ITRs. In further embodiments, the AAV9 vector is less than 4.75 kb from ITR to ITR in size, inclusive of both ITRs. In further embodiments, the AAV9 vector is less than 4.7 kb from ITR to ITR in size, inclusive of both ITRs. In some embodiments, the second vector comprises from 5′ to 3′ with respect to the plus strand: a promoter for expression of a first copy of a first guide RNA (e.g., a U6 promoter), a first copy of a nucleotide sequence encoding a first guide RNA, a first copy of a nucleotide sequence encoding a first guide RNA scaffold, a promoter for expression of a second copy of the first guide RNA (e.g., a H1 promoter), a second copy of the nucleotide sequence encoding the first guide RNA, a second copy of the nucleotide sequence encoding the first guide RNA scaffold, a promoter for expression of a second guide RNA (e.g., a 7SK promoter), a nucleotide sequence encoding a second guide RNA, and a nucleotide sequence encoding a second guide RNA scaffold. In some embodiments, the second vector comprises from 5′ to 3′ with respect to the plus strand: a promoter for expression of a first guide RNA (e.g., a U6 promoter), a nucleotide sequence encoding a first guide RNA, a nucleotide sequence encoding a first guide RNA scaffold, a promoter for expression of a second guide RNA (e.g., a 7SK promoter), a nucleotide sequence encoding a second guide RNA, and a nucleotide sequence encoding a second guide RNA scaffold. In some embodiments, the second vector comprises a stuffer sequence (e.g., a 3′UTR desmin sequence) between the nucleotide sequence encoding the first guide scaffold sequence and the promoter for expression of the second guide sequence. In some embodiments, the second vector comprises from 5′ to 3′ with respect to the plus strand: the reverse complement of a nucleotide sequence encoding a scaffold for a first guide RNA, the reverse complement of a nucleotide sequence encoding a first guide RNA, the reverse complement of a promoter for expression of the first guide RNA (e.g., a U6c promoter), a promoter for expression of a second guide RNA (e.g., a U6c promoter), a nucleotide sequence encoding a second guide RNA, and a nucleotide sequence encoding a second guide RNA scaffold. In some embodiments, the second vector comprises a stuffer sequence (e.g., a 3′UTR desmin sequence) between the reverse complement of the promoter for expression of the first guide RNA and the promoter for expression of the second guide RNA. In some embodiments, the second vector comprises from 5′ to 3′ with respect to the plus strand: the reverse complement of a nucleotide sequence encoding a first copy of a first guide RNA scaffold, the reverse complement of a nucleotide sequence encoding a first copy of the first guide RNA, the reverse complement of a promoter for expression of the first copy of the first guide RNA (e.g., a 7SK2 promoter), the reverse complement of a second copy of the nucleotide sequence encoding the first guide RNA scaffold, the reverse complement of a second copy of the nucleotide sequence encoding the first guide RNA, the reverse complement of a promoter for expression of the second copy of the nucleotide sequence encoding the first guide RNA (e.g., a hU6c promoter), a promoter for expression of a first copy of a second guide RNA (e.g., a hU6c promoter), a first copy of a nucleotide sequence encoding a second guide RNA, a first copy of a nucleotide sequence encoding a second guide RNA scaffold, a promoter for expression of a second copy of the second guide RNA (e.g., a 7Sk2 promoter), a second copy of the nucleotide sequence encoding the second guide RNA, and a second copy of the nucleotide sequence encoding the second guide RNA scaffold. In some embodiments, the second vector comprises a stuffer sequence (e.g., a 3′UTR desmin sequence) between the reverse complement of the promoter for expression of the second copy of the first guide RNA and the promoter for expression of the first copy of the second guide RNA. In some embodiments, the second vector comprises from 5′ to 3′ with respect to the plus strand: the reverse complement of a nucleotide sequence encoding a first copy of a first guide RNA scaffold, the reverse complement of a first copy of a nucleotide sequence encoding the first guide RNA, the reverse complement of a promoter for expression of the first copy of the first guide RNA (e.g., a 7SK2 promoter), the reverse complement of a first copy of a nucleotide sequence encoding a second guide RNA scaffold, the reverse complement of a nucleotide sequence encoding the first copy of the second guide RNA, the reverse complement of a promoter for expression of the first copy of the second guide RNA (e.g., a hU6c promoter), a promoter for expression of a second copy of the second guide RNA (e.g., a hU6c promoter), a second copy of the nucleotide sequence encoding the second guide RNA, a second copy of the nucleotide sequence encoding the second guide RNA scaffold, a promoter for expression of a second copy of the first guide RNA (e.g., a 7SK2 promoter), a second copy of the nucleotide sequence encoding the first guide RNA, and a second copy of the nucleotide sequence encoding the first guide RNA scaffold. In some embodiments, the second vector comprises a stuffer sequence (e.g., a 3′UTR desmin sequence) between the reverse complement of the promoter for expression of the first copy of the second guide RNA and the promoter for expression of the second copy of the first guide RNA. In some embodiments, the second vector comprises from 5′ to 3′ with respect to the plus strand: the reverse complement of a nucleotide sequence encoding a first guide RNA scaffold, the reverse complement of a nucleotide sequence encoding a first guide RNA, the reverse complement of a promoter for expression of a first guide RNA (e.g., a hU6c promoter), a promoter for expression of a second guide RNA (e.g., a hU6c promoter), a nucleotide sequence encoding a second guide RNA, and a nucleotide sequence encoding a second guide RNA scaffold. In some embodiments, the second vector comprises a stuffer sequence (e.g., a 3′UTR desmin sequence) between the reverse complement of the promoter for expression of the first guide RNA and the promoter for expression of the second guide RNA. In particular embodiments, the first guide RNA is different from the second guide RNA. In some embodiments, the first guide RNA comprises the sequence of SEQ ID NO: 12 and the second guide RNA comprises the sequence of SEQ ID NO: 1013. In some embodiments, the first guide RNA comprises the sequence of SEQ ID NO: 1013 and the second guide RNA comprises the sequence of SEQ ID NO: 12. In some embodiments, a) the first guide RNA comprises the sequence of SEQ ID NO: 148 and the second guide RNA comprises the sequence of SEQ ID NO: 134; b) the second guide RNA comprises the sequence of SEQ ID NO: 145 and the second guide RNA comprises the sequence of SEQ ID NO: 131; c) the first guide RNA comprises the sequence of SEQ ID NO: 134 and the second guide RNA comprises the sequence of SEQ ID NO: 148; or d) the second guide RNA comprises the sequence of SEQ ID NO: 131 and the second guide RNA comprises the sequence of SEQ ID NO: 145. In some embodiments, the scaffold for the first guide RNA comprises the sequence of SEQ ID NO: 901. In some embodiments, the scaffold for the second guide RNA comprises the sequence of SEQ ID NO: 901. In some embodiments, any of the second vectors comprises a stuffer sequence. In some embodiments, the stuffer sequence is a 3′UTR sequence. In some embodiments, the 3′UTR desmin sequence comprises a sequence that is at least 80%, 85%, 90%, 91%, 92%, 93%, 94%, 95%, 96%, 97%, 98%, 99%, or 100% identical to the sequence of SEQ ID NO: 552 (taattaacagatttgt taatgaagaggaaatatacaaatattaatgaacaaaatagtgtgtttagaacaagactcacatacaggagacatacacatgttaaaggaggcattaga atagtggggaaaacttacaaattcagtatagggtaggagcactagatagctaagaggtggggtagggggcagagtgaaggctgtctctcttttact ccttctaaaaatattccagtggatcaaagatgtaggaaacgatggatccatgtaggcctcagccttcaagtactcctctgagatttcagggattatcctt taaaggagtcaggaagagggtagagatcacaaagataataagctcagacagtagtatgttaaataaacctcaggaggttttagtcttaaggtccttaa tctgaccttccaaactgacttttccagaaacttccaaaagcctctc) or fragments thereof.

[0462] In some embodiments, if the composition comprises one or more nucleic acids encoding an RNA-targeted endonuclease and one or more guide RNAs, the one or more nucleic acids are designed such that they express the one or more guide RNAs at an equivalent or higher level (e.g., a greater number of expressed transgene copies) as compared to the expression level of the RNA-targeted endonuclease. In some embodiments, the one or more nucleic acids are designed such that they express (e.g., on average in 100 cells) the one or more guide RNAs at least a 1.1, 1.2, 1.3, 1.4, or 1.5 times higher level (e.g., a greater number of expressed transgene copies) as compared to the expression level of the RNA-targeted endonuclease. In some embodiments, the one or more nucleic acids are designed such that they express the one or more guide RNAs at 1.01-1.5, 1.01-1.4, 1.01-1.3, 1.01-1.2, 1.01-1.1, 1.1-2.0, 1.1-1.8, 1.1-1.6, 1.1-1.4, 1.1-1.3, 1.2-2.0, 1.2-1.8, 1.2-1.6, 1.2-1.4, 1.4-2.0, 1.4-1.8, 1.4-1.6, 1.6-2.0, 1.6-1.8, or 1.8-2.0 times higher level (e.g., a greater number of expressed transgene copies) as compared to the expression level of the RNA-targeted endonuclease. In some embodiments, the one or more guide RNAs are designed to express a higher level than the RNA-targeted endonuclease by: a) utilizing one or more regulatory elements (e.g., promoters or enhancers) that express the one or more guide RNAs at a higher level as compared to the regulatory elements (e.g., promoters or enhancers) for expression of the RNA-targeted endonuclease; and/or b) expressing more copies of one or more of the guide RNAs as compared to the number of copies of the RNA-targeted endonuclease (e.g., 2× or 3× as many copies of the nucleotide sequences encoding the one or more guide RNAs as compared to the number of copies of the nucleotide sequences encoding the RNA-targeted endonuclease). For example, in some embodiments, the composition comprises multiple nucleic acid molecules (e.g., in multiple vectors), wherein for every nucleotide sequence encoding an RNA-targeted endonuclease in the nucleic acid molecules in the composition, there are two or three copies of the nucleotide sequence encoding the guide RNA in the nucleic acid molecules in the composition. In some embodiments, the composition comprises a first guide RNA and a second guide RNA, wherein the first guide RNA and the second guide RNA are not the same (e.g., any of the guide RNA pairs disclosed herein), and for every nucleotide sequence encoding an RNA-targeted endonuclease in the nucleic acid molecules in the composition, there are two or three copies of the nucleotide sequence encoding the first guide RNA and/or the second guide RNA.

[0463] In some embodiments, any of the nucleic acids disclosed herein encodes an RNA-targeted endonuclease. In some embodiments, the RNA-targeted endonuclease has cleavase activity, which can also be referred to as double-strand endonuclease activity. In some embodiments, the RNA-targeted endonuclease comprises a Cas nuclease. Examples of Cas9 nucleases include those of the type II CRISPR systems of S. pyogenes, S. aureus, and other prokaryotes (see, e.g., the list in the next paragraph), and modified (e.g., engineered or mutant) versions thereof. See, e.g., US2016/0312198 A1; US 2016/0312199 A1. In particular embodiments, the RNA-targeted endonuclease is a type II CRISPR Cas enzyme. Other examples of Cas nucleases include a Csm or Cmr complex of a type III CRISPR system or the Cas10, Csm1, or Cmr2 subunit thereof; and a Cascade complex of a type I CRISPR system, or the Cas3 subunit thereof. In some embodiments, the Cas nuclease may be from a Type-IIA, Type-IIB, or Type-IIC system. For discussion of various CRISPR systems and Cas nucleases see, e.g., Makarova et al., NAT. REV. MICROBIOL. 9:467-477 (2011); Makarova et al., NAT. REV. MICROBIOL, 13: 722-36 (2015); Shmakov et al., MOLECULAR CELL, 60:385-397 (2015).

[0464] Non-limiting exemplary species that the Cas nuclease can be derived from include Streptococcus pyogenes, Streptococcus thermophilus, Streptococcus sp., Staphylococcus aureus, Listeria innocua, Lactobacillus gasseri, Francisella novicida, Wolinella succinogenes, Sutterella wadsworthensis, Gammaproteobacterium, Neisseria meningitidis, Campylobacter jejuni, Pasteurella multocida, Fibrobacter succinogene, Rhodospirillum rubrum, Nocardiopsis dassonvillei, Streptomyces pristinaespiralis, Streptomyces viridochromogenes, Streptomyces viridochromogenes, Streptosporangium roseum, Streptosporangium roseum, Alicyclobacillus acidocaldarius, Bacillus pseudomycoides, Bacillus selenitireducens, Exiguobacterium sibiricum, Lactobacillus delbrueckii, Lactobacillus salivarius, Lactobacillus buchneri, Treponema denticola, Microscilla marina, Burkholderiales bacterium, Polaromonas naphthalenivorans, Polaromonas sp., Crocosphaera watsonii, Cyanothece sp., Microcystis aeruginosa, Synechococcus sp., Acetohalobium arabaficum, Ammonifex degensii, Caldicelulosiruptor becscii, Candidatus Desulforudis, Clostridium botulinum, Clostridium difficile, Finegoldia magna, Natranaerobius thermophilus, Pelotomaculum thermopropionicum, Acidithiobacillus caldus, Acidithiobacillus ferrooxidans, Allochromafium vinosum, Marinobacter sp., Nitrosococcus halophilus, Nitrosococcus watsoni, Pseudoalteromonas haloplanktis, Ktedonobacter racemifer, Methanohalobium evestigatum, Anabaena variabilis, Nodularia spumigena, Nostoc sp., Arthrospira maxima, Arthrospira platensis, Arthrospira sp., Lyngbya sp., Microcoleus chthonoplastes, Oscillatoria sp., Petrotoga mobilis, Thermosipho africanus, Streptococcus pasteurianus, Neisseria cinerea, Campylobacter lari, Parvibaculum lavamentivorans, Corynebacterium diphtheria, Acidaminococcus sp., Lachnospiraceae bacterium ND2006, and Acaryochloris marina.

[0465] In some embodiments, the nucleic acid encoding SaCas9 encodes an SaCas9 comprising an amino acid sequence that is at least 80%, 85%, 90%, 91%, 92%, 93%, 94%, 95%, 96%, 97%, 98%, 99% or 100% identical to the sequence of SEQ ID NO: 711:

KRNYILGLDIGITSVGYGIIDYETRDVIDAGVRLFKEANVENNEGRRSK
RGARRLKRRRRHRIQRVKKLLFDYNLLTDHSELSGINPYEARVKGLSQK
LSEEEFSAALLHLAKRRGVHNVNEVEEDTGNELSTKEQISRNSKALEEK
YVAELQLERLKKDGEVRGSINRFKTSDYVKEAKQLLKVQKAYHQLDQSF
IDTYIDLLETRRTYYEGPGEGSPFGWKDIKEWYEMLMGHCTYFPEELRS
VKYAYNADLYNALNDLNNLVITRDENEKLEYYEKFQIIENVFKQKKKPT
LKQIAKEILVNEEDIKGYRVTSTGKPEFTNLKVYHDIKDITARKEIIEN
AELLDQIAKILTIYQSSEDIQEELTNLNSELTQEEIEQISNLKGYTGTH
NLSLKAINLILDELWHTNDNQIAIFNRLKLVPKKVDLSQQKEIPTTLVD
DFILSPVVKRSFIQSIKVINAIIKKYGLPNDIIIELAREKNSKDAQKMI
NEMQKRNRQTNERIEEIIRTTGKENAKYLIEKIKLHDMQEGKCLYSLEA
IPLEDLLNNPFNYEVDHIIPRSVSFDNSFNNKVLVKQEENSKKGNRTPF
QYLSSSDSKISYETFKKHILNLAKGKGRISKTKKEYLLEERDINRFSVQ
KDFINRNLVDTRYATRGLMNLLRSYFRVNNLDVKVKSINGGFTSFLRRK
WKFKKERNKGYKHHAEDALIIANADFIFKEWKKLDKAKKVMENQMFEEK
QAESMPEIETEQEYKEIFITPHQIKHIKDFKDYKYSHRVDKKPNRELIN
DTLYSTRKDDKGNTLIVNNLNGLYDKDNDKLKKLINKSPEKLLMYHHDP
QTYQKLKLIMEQYGDEKNPLYKYYEETGNYLTKYSKKDNGPVIKKIKYY
GNKLNAHLDITDDYPNSRNKVVKLSLKPYRFDVYLDNGVYKFVTVKNLD
VIKKENYYEVNSKCYEEAKKLKKISNQAEFIASFYNNDLIKINGELYRV
IGVNNDLLNRIEVNMIDITYREYLENMNDKRPPRIIKTIASKTQSIKKY
STDILGNLYEVKSKKHPQIIKKG.

[0466] In some embodiments, the nucleic acid encoding SaCas9 comprises the nucleic acid of SEQ ID NO: 9014:

AAGCGCAATTACATCCTGGGCCTGGATATCGGCATCACCTCCGTGGGCTACG
GCATCATCGACTATGAGACACGGGATGTGATCGACGCCGGCGTGAGACTGTTCAAGGAG
GCCAACGTGGAGAACAATGAGGGCCGGCGGAGCAAGAGGGGAGCAAGGCGCCTGAAGC
GGAGAAGGCGCCACAGAATCCAGAGAGTGAAGAAGCTGCTGTTCGATTACAACCTGCTG
ACCGACCACTCCGAGCTGTCTGGCATCAATCCTTATGAGGCCCGGGTGAAGGGCCTGTCC
CAGAAGCTGTCTGAGGAGGAGTTTTCTGCCGCCCTGCTGCACCTGGCAAAGAGGAGAGG
CGTGCACAACGTGAATGAGGTGGAGGAGGACACCGGCAACGAGCTGAGCACAAAGGAG
CAGATCAGCCGCAATTCCAAGGCCCTGGAGGAGAAGTATGTGGCCGAGCTGCAGCTGGA
GCGGCTGAAGAAGGATGGCGAGGTGAGGGGCTCCATCAATCGCTTCAAGACCTCTGACT
ACGTGAAGGAGGCCAAGCAGCTGCTGAAGGTGCAGAAGGCCTACCACCAGCTGGATCAG
AGCTTTATCGATACATATATCGACCTGCTGGAGACCAGGCGCACATACTATGAGGGACC
AGGAGAGGGCTCCCCCTTCGGCTGGAAGGACATCAAGGAGTGGTACGAGATGCTGATGG
GCCACTGCACCTATTTTCCAGAGGAGCTGAGATCCGTGAAGTACGCCTATAACGCCGATC
TGTACAACGCCCTGAATGACCTGAACAACCTGGTCATCACCAGGGATGAGAACGAGAAG
CTGGAGTACTATGAGAAGTTCCAGATCATCGAGAACGTGTTCAAGCAGAAGAAGAAGCC
TACACTGAAGCAGATCGCCAAGGAGATCCTGGTGAACGAGGAGGACATCAAGGGCTACC
GCGTGACCAGCACAGGCAAGCCAGAGTTCACCAATCTGAAGGTGTATCACGATATCAAG
GACATCACAGCCCGGAAGGAGATCATCGAGAACGCCGAGCTGCTGGATCAGATCGCCAA
GATCCTGACCATCTATCAGAGCTCCGAGGACATCCAGGAGGAGCTGACCAACCTGAATA
GCGAGCTGACACAGGAGGAGATCGAGCAGATCAGCAATCTGAAGGGCTACACCGGCAC
ACACAACCTGTCCCTGAAGGCCATCAATCTGATCCTGGATGAGCTGTGGCACACAAACG
ACAATCAGATCGCCATCTTTAACAGGCTGAAGCTGGTGCCAAAGAAGGTGGACCTGAGC
CAGCAGAAGGAGATCCCAACCACACTGGTGGACGATTTCATCCTGTCCCCCGTGGTGAA
GCGGAGCTTCATCCAGAGCATCAAAGTGATCAACGCCATCATCAAGAAGTACGGCCTGC
CCAATGATATCATCATCGAGCTGGCCAGGGAGAAGAACTCTAAGGACGCCCAGAAGATG
ATCAATGAGATGCAGAAGAGGAACCGCCAGACCAATGAGCGGATCGAGGAGATCATCA
GAACCACAGGCAAGGAGAACGCCAAGTACCTGATCGAGAAGATCAAGCTGCACGATAT
GCAGGAGGGCAAGTGTCTGTATAGCCTGGAGGCCATCCCTCTGGAGGACCTGCTGAACA
ATCCATTCAACTACGAGGTGGATCACATCATCCCCCGGAGCGTGAGCTTCGACAATTCCT
TTAACAATAAGGTGCTGGTGAAGCAGGAGGAGAACTCTAAGAAGGGCAATAGGACCCCT
TTCCAGTACCTGTCTAGCTCCGATTCTAAGATCAGCTACGAGACCTTCAAGAAGCACATC
CTGAATCTGGCCAAGGGCAAGGGCCGCATCTCTAAGACCAAGAAGGAGTACCTGCTGGA
GGAGCGGGACATCAACAGATTCAGCGTGCAGAAGGACTTCATCAACCGGAATCTGGTGG
ACACCAGATACGCCACACGCGGCCTGATGAATCTGCTGCGGTCCTATTTCAGAGTGAACA
ATCTGGATGTGAAGGTGAAGAGCATCAACGGCGGCTTCACCTCCTTTCTGCGGAGAAAG
TGGAAGTTTAAGAAGGAGAGAAACAAGGGCTATAAGCACCACGCCGAGGATGCCCTGAT
CATCGCCAATGCCGACTTCATCTTTAAGGAGTGGAAGAAGCTGGACAAGGCCAAGAAAG
TGATGGAGAACCAGATGTTCGAGGAGAAGCAGGCCGAGAGCATGCCCGAGATCGAGAC
CGAGCAGGAGTACAAGGAGATTTTCATCACACCTCACCAGATCAAGCACATCAAGGACT
TCAAGGACTACAAGTATTCCCACAGGGTGGATAAGAAGCCCAACCGCGAGCTGATCAAT
GACACCCTGTATTCTACAAGGAAGGACGATAAGGGCAATACCCTGATCGTGAACAATCT
GAACGGCCTGTACGACAAGGATAATGACAAGCTGAAGAAGCTGATCAACAAGAGCCCC
GAGAAGCTGCTGATGTACCACCACGATCCTCAGACATATCAGAAGCTGAAGCTGATCAT
GGAGCAGTACGGCGACGAGAAGAACCCACTGTATAAGTACTATGAGGAGACCGGCAACT
ACCTGACAAAGTATTCCAAGAAGGATAATGGCCCCGTGATCAAGAAGATCAAGTACTAT
GGCAACAAGCTGAATGCCCACCTGGACATCACCGACGATTACCCCAACAGCCGGAATAA
GGTGGTGAAGCTGAGCCTGAAGCCATACAGGTTCGACGTGTACCTGGACAACGGCGTGT
ATAAGTTTGTGACAGTGAAGAATCTGGATGTGATCAAGAAGGAGAACTACTATGAAGTG
AATAGCAAGTGCTACGAGGAGGCCAAGAAGCTGAAGAAGATCAGCAACCAGGCCGAGT
TCATCGCCTCTTTTTACAACAATGACCTGATCAAGATCAATGGCGAGCTGTATAGAGTGA
TCGGCGTGAACAATGATCTGCTGAACCGCATCGAAGTGAATATGATCGACATCACCTACC
GGGAGTATCTGGAGAACATGAATGATAAGAGGCCCCCTCGCATCATCAAGACCATCGCC
TCTAAGACACAGAGCATCAAGAAGTACTCTACAGACATCCTGGGCAACCTGTATGAGGT
GAAGAGCAAGAAGCACCCTCAGATCATCAAGAAGGGC.

[0467] In some embodiments comprising a nucleic acid encoding SaCas9, the SaCas9 comprises an amino acid sequence of SEQ ID NO: 711.

[0468] In some embodiments, the SaCas9 is a variant of the amino acid sequence of SEQ ID NO: 711. In some embodiments, the SaCas9 comprises an amino acid other than an E at the position corresponding to position 781 of SEQ ID NO: 711. In some embodiments, the SaCas9 comprises an amino acid other than an N at the position corresponding to position 967 of SEQ ID NO: 711. In some embodiments, the SaCas9 comprises an amino acid other than an R at the position corresponding to position 1014 of SEQ ID NO: 711. In some embodiments, the SaCas9 comprises a K at the position corresponding to position 781 of SEQ ID NO: 711. In some embodiments, the SaCas9 comprises a K at the position corresponding to position 967 of SEQ ID NO: 711. In some embodiments, the SaCas9 comprises an H at the position corresponding to position 1014 of SEQ ID NO: 711. In some embodiments, the SaCas9 comprises an amino acid other than an E at the position corresponding to position 781 of SEQ ID NO: 711; an amino acid other than an N at the position corresponding to position 967 of SEQ ID NO: 711; and an amino acid other than an R at the position corresponding to position 1014 of SEQ ID NO: 711. In some embodiments, the SaCas9 comprises a K at the position corresponding to position 781 of SEQ ID NO: 711; a K at the position corresponding to position 967 of SEQ ID NO: 711; and an H at the position corresponding to position 1014 of SEQ ID NO: 711.

[0469] In some embodiments, the SaCas9 comprises an amino acid other than an R at the position corresponding to position 244 of SEQ ID NO: 711. In some embodiments, the SaCas9 comprises an amino acid other than an N at the position corresponding to position 412 of SEQ ID NO: 711. In some embodiments, the SaCas9 comprises an amino acid other than an N at the position corresponding to position 418 of SEQ ID NO: 711. In some embodiments, the SaCas9 comprises an amino acid other than an R at the position corresponding to position 653 of SEQ ID NO: 711. In some embodiments, the SaCas9 comprises an amino acid other than an R at the position corresponding to position 244 of SEQ ID NO: 711; an amino acid other than an N at the position corresponding to position 412 of SEQ ID NO: 711; an amino acid other than an N at the position corresponding to position 418 of SEQ ID NO: 711; and an amino acid other than an R at the position corresponding to position 653 of SEQ ID NO: 711. In some embodiments, the SaCas9 comprises an A at the position corresponding to position 244 of SEQ ID NO: 711. In some embodiments, the SaCas9 comprises an A at the position corresponding to position 412 of SEQ ID NO: 711. In some embodiments, the SaCas9 comprises an A at the position corresponding to position 418 of SEQ ID NO: 711. In some embodiments, the SaCas9 comprises an A at the position corresponding to position 653 of SEQ ID NO: 711. In some embodiments, the SaCas9 comprises an A at the position corresponding to position 244 of SEQ ID NO: 711; an A at the position corresponding to position 412 of SEQ ID NO: 711; an A at the position corresponding to position 418 of SEQ ID NO: 711; and an A at the position corresponding to position 653 of SEQ ID NO: 711.

[0470] In some embodiments, the SaCas9 comprises an amino acid other than an R at the position corresponding to position 244 of SEQ ID NO: 711; an amino acid other than an N at the position corresponding to position 412 of SEQ ID NO: 711; an amino acid other than an N at the position corresponding to position 418 of SEQ ID NO: 711; an amino acid other than an R at the position corresponding to position 653 of SEQ ID NO: 711; an amino acid other than an E at the position corresponding to position 781 of SEQ ID NO: 711; an amino acid other than an N at the position corresponding to position 967 of SEQ ID NO: 711; and an amino acid other than an R at the position corresponding to position 1014 of SEQ ID NO: 711. In some embodiments, the SaCas9 comprises an A at the position corresponding to position 244 of SEQ ID NO: 711; an A at the position corresponding to position 412 of SEQ ID NO: 711; an A at the position corresponding to position 418 of SEQ ID NO: 711; an A at the position corresponding to position 653 of SEQ ID NO: 711; a K at the position corresponding to position 781 of SEQ ID NO: 711; a K at the position corresponding to position 967 of SEQ ID NO: 711; and an H at the position corresponding to position 1014 of SEQ ID NO: 711.

[0471] In some embodiments, the SaCas9 comprises an amino acid sequence that is at least 80%, 85%, 90%, 91%, 92%, 93%, 94%, 95%, 96%, 97%, 98%, 99% or 100% identical to the sequence of SEQ ID NO: 715 (designated herein as SaCas9-KKH or SACAS9KKH):

KRNYILGLDIGITSVGYGIIDYETRDVIDAGVRLFKEANVENNEGRRSK
RGARRLKRRRRHRIQRVKKLLFDYNLLTDHSELSGINPYEARVKGLSQK
LSEEEFSAALLHLAKRRGVHNVNEVEEDTGNELSTKEQISRNSKALEEK
YVAELQLERLKKDGEVRGSINRFKTSDYVKEAKQLLKVQKAYHQLDQSF
IDTYIDLLETRRTYYEGPGEGSPFGWKDIKEWYEMLMGHCTYFPEELRS
VKYAYNADLYNALNDLNNLVITRDENEKLEYYEKFQIIENVFKQKKKPT
LKQIAKEILVNEEDIKGYRVTSTGKPEFTNLKVYHDIKDITARKEIIEN
AELLDQIAKILTIYQSSEDIQEELTNLNSELTQEEIEQISNLKGYTGTH
NLSLKAINLILDELWHTNDNQIAIFNRLKLVPKKVDLSQQKEIPTTLVD
DFILSPVVKRSFIQSIKVINAIIKKYGLPNDIIIELAREKNSKDAQKMI
NEMQKRNRQTNERIEEIIRTTGKENAKYLIEKIKLHDMQEGKCLYSLEA
IPLEDLLNNPFNYEVDHIIPRSVSFDNSFNNKVLVKQEENSKKGNRTPF
QYLSSSDSKISYETFKKHILNLAKGKGRISKTKKEYLLEERDINRFSVQ
KDFINRNLVDTRYATRGLMNLLRSYFRVNNLDVKVKSINGGFTSFLRRK
WKFKKERNKGYKHHAEDALIIANADFIFKEWKKLDKAKKVMENQMFEEK
QAESMPEIETEQEYKEIFITPHQIKHIKDFKDYKYSHRVDKKPNRKLIN
DTLYSTRKDDKGNTLIVNNLNGLYDKDNDKLKKLINKSPEKLLMYHHDP
QTYQKLKLIMEQYGDEKNPLYKYYEETGNYLTKYSKKDNGPVIKKIKYY
GNKLNAHLDITDDYPNSRNKVVKLSLKPYRFDVYLDNGVYKFVTVKNLD
VIKKENYYEVNSKCYEEAKKLKKISNQAEFIASFYKNDLIKINGELYRV
IGVNNDLLNRIEVNMIDITYREYLENMNDKRPPHIIKTIASKTQSIKKY
STDILGNLYEVKSKKHPQIIKKG.

[0472] In some embodiments, the SaCas9 comprises an amino acid sequence that is at least 80%, 85%, 90%, 91%, 92%, 93%, 94%, 95%, 96%, 97%, 98%, 99% or 100% identical to the sequence of SEQ ID NO: 716 (designated herein as SaCas9-HF):

KRNYILGLDIGITSVGYGIIDYETRDVIDAGVRLFKEANVENNEGRRSKRGARRLKRRRRHRI
QRVKKLLFDYNLLTDHSELSGINPYEARVKGLSQKLSEEEFSAALLHLAKRRGVHNVNEVEE
DTGNELSTKEQISRNSKALEEKYVAELQLERLKKDGEVRGSINRFKTSDYVKEAKQLLKVQK
AYHQLDQSFIDTYIDLLETRRTYYEGPGEGSPFGWKDIKEWYEMLMGHCTYFPEELASVKYA
YNADLYNALNDLNNLVITRDENEKLEYYEKFQIIENVFKQKKKPTLKQIAKEILVNEEDIKGY
RVTSTGKPEFTNLKVYHDIKDITARKEIIENAELLDQIAKILTIYQSSEDIQEELTNLNSELTQEE
IEQISNLKGYTGTHNLSLKAINLILDELWHTNDAQIAIFARLKLVPKKVDLSQQKEIPTTLVDD
FILSPVVKRSFIQSIKVINAIIKKYGLPNDIIIELAREKNSKDAQKMINEMQKRNRQTNERIEEIIR
TTGKENAKYLIEKIKLHDMQEGKCLYSLEAIPLEDLLNNPFNYEVDHIIPRSVSFDNSFNNKVL
VKQEENSKKGNRTPFQYLSSSDSKISYETFKKHILNLAKGKGRISKTKKEYLLEERDINRFSVQ
KDFINRNLVDTRYATAGLMNLLRSYFRVNNLDVKVKSINGGFTSFLRRKWKFKKERNKGYK
HHAEDALIIANADFIFKEWKKLDKAKKVMENQMFEEKQAESMPEIETEQEYKEIFITPHQIKHI
KDFKDYKYSHRVDKKPNRELINDTLYSTRKDDKGNTLIVNNLNGLYDKDNDKLKKLINKSP
EKLLMYHHDPQTYQKLKLIMEQYGDEKNPLYKYYEETGNYLTKYSKKDNGPVIKKIKYYGN
KLNAHLDITDDYPNSRNKVVKLSLKPYRFDVYLDNGVYKFVTVKNLDVIKKENYYEVNSKC
YEEAKKLKKISNQAEFIASFYNNDLIKINGELYRVIGVNNDLLNRIEVNMIDITYREYLENMN
DKRPPRIIKTIASKTQSIKKYSTDILGNLYEVKSKKHPQIIKKG.

[0473] In some embodiments, the SaCas9 comprises an amino acid sequence that is at least 80%, 85%, 90%, 91%, 92%, 93%, 94%, 95%, 96%, 97%, 98%, 99% or 100% identical to the sequence of SEQ ID NO: 717 (designated herein as SaCas9-KKH-HF):

KRNYILGLDIGITSVGYGIIDYETRDVIDAGVRLFKEANVENNEGRRSKRGARRLKRRRRHRI
QRVKKLLFDYNLLTDHSELSGINPYEARVKGLSQKLSEEEFSAALLHLAKRRGVHNVNEVEE
DTGNELSTKEQISRNSKALEEKYVAELQLERLKKDGEVRGSINRFKTSDYVKEAKQLLKVQK
AYHQLDQSFIDTYIDLLETRRTYYEGPGEGSPFGWKDIKEWYEMLMGHCTYFPEELASVKYA
YNADLYNALNDLNNLVITRDENEKLEYYEKFQIIENVFKQKKKPTLKQIAKEILVNEEDIKGY
RVTSTGKPEFTNLKVYHDIKDITARKEIIENAELLDQIAKILTIYQSSEDIQEELTNLNSELTQEE
IEQISNLKGYTGTHNLSLKAINLILDELWHTNDAQIAIFARLKLVPKKVDLSQQKEIPTTLVDD
FILSPVVKRSFIQSIKVINAIIKKYGLPNDIIIELAREKNSKDAQKMINEMQKRNRQTNERIEEIIR
TTGKENAKYLIEKIKLHDMQEGKCLYSLEAIPLEDLLNNPFNYEVDHIIPRSVSFDNSFNNKVL
VKQEENSKKGNRTPFQYLSSSDSKISYETFKKHILNLAKGKGRISKTKKEYLLEERDINRFSVQ
KDFINRNLVDTRYATAGLMNLLRSYFRVNNLDVKVKSINGGFTSFLRRKWKFKKERNKGYK
HHAEDALIIANADFIFKEWKKLDKAKKVMENQMFEEKQAESMPEIETEQEYKEIFITPHQIKHI
KDFKDYKYSHRVDKKPNRKLINDTLYSTRKDDKGNTLIVNNLNGLYDKDNDKLKKLINKSP
EKLLMYHHDPQTYQKLKLIMEQYGDEKNPLYKYYEETGNYLTKYSKKDNGPVIKKIKYYGN
KLNAHLDITDDYPNSRNKVVKLSLKPYRFDVYLDNGVYKFVTVKNLDVIKKENYYEVNSKC
YEEAKKLKKISNQAEFIASFYKNDLIKINGELYRVIGVNNDLLNRIEVNMIDITYREYLENMN
DKRPPHIIKTIASKTQSIKKYSTDILGNLYEVKSKKHPQIIKKG.

[0474] In some embodiments, the nucleic acid encoding SluCas9 encodes a SluCas9 comprising an amino acid sequence that is at least 80%, 85%, 90%, 91%, 92%, 93%, 94%, 95%, 96%, 97%, 98%, 99% or 100% identical to the sequence of SEQ ID NO: 712:

NQKFILGLDIGITSVGYGLIDYETKNIIDAGVRLFPEANVENNEGRRSKRGSRRLKRRRIHRLE
RVKKLLEDYNLLDQSQIPQSTNPYAIRVKGLSEALSKDELVIALLHIAKRRGIHKIDVIDSNDD
VGNELSTKEQLNKNSKLLKDKFVCQIQLERMNEGQVRGEKNRFKTADIIKEIIQLLNVQKNFH
QLDENFINKYIELVEMRREYFEGPGKGSPYGWEGDPKAWYETLMGHCTYFPDELRSVKYAY
SADLFNALNDLNNLVIQRDGLSKLEYHEKYHIIENVFKQKKKPTLKQIANEINVNPEDIKGYRI
TKSGKPQFTEFKLYHDLKSVLFDQSILENEDVLDQIAEILTIYQDKDSIKSKLTELDILLNEEDK
ENIAQLTGYTGTHRLSLKCIRLVLEEQWYSSRNQMEIFTHLNIKPKKINLTAANKIPKAMIDEF
ILSPVVKRTFGQAINLINKIIEKYGVPEDIIIELARENNSKDKQKFINEMQKKNENTRKRINEIIG
KYGNQNAKRLVEKIRLHDEQEGKCLYSLESIPLEDLLNNPNHYEVDHIIPRSVSFDNSYHNKV
LVKQSENSKKSNLTPYQYFNSGKSKLSYNQFKQHILNLSKSQDRISKKKKEYLLEERDINKFE
VQKEFINRNLVDTRYATRELTNYLKAYFSANNMNVKVKTINGSFTDYLRKVWKFKKERNH
GYKHHAEDALIIANADFLFKENKKLKAVNSVLEKPEIETKQLDIQVDSEDNYSEMFIIPKQVQ
DIKDFRNFKYSHRVDKKPNRQLINDTLYSTRKKDNSTYIVQTIKDIYAKDNTTLKKQFDKSPE
KFLMYQHDPRTFEKLEVIMKQYANEKNPLAKYHEETGEYLTKYSKKNNGPIVKSLKYIGNK
LGSHLDVTHQFKSSTKKLVKLSIKPYRFDVYLTDKGYKFITISYLDVLKKDNYYYIPEQKYDK
LKLGKAIDKNAKFIASFYKNDLIKLDGEIYKIIGVNSDTRNMIELDLPDIRYKEYCELNNIKGEP
RIKKTIGKKVNSIEKLTTDVLGNVFTNTQYTKPQLLFKRGN.

[0475] In some embodiments, the SluCas9 is a variant of the amino acid sequence of SEQ ID NO: 712. In some embodiments, the SluCas9 comprises an amino acid other than an Q at the position corresponding to position 781 of SEQ ID NO: 712. In some embodiments, the SluCas9 comprises an amino acid other than an R at the position corresponding to position 1013 of SEQ ID NO: 712. In some embodiments, the SluCas9 comprises a K at the position corresponding to position 781 of SEQ ID NO: 712. In some embodiments, the SluCas9 comprises a K at the position corresponding to position 966 of SEQ ID NO: 712. In some embodiments, the SluCas9 comprises an H at the position corresponding to position 1013 of SEQ ID NO: 712. In some embodiments, the SluCas9 comprises an amino acid other than an Q at the position corresponding to position 781 of SEQ ID NO: 712; and an amino acid other than an R at the position corresponding to position 1013 of SEQ ID NO: 712. In some embodiments, the SluCas9 comprises a K at the position corresponding to position 781 of SEQ ID NO: 712; a K at the position corresponding to position 966 of SEQ ID NO: 712; and an H at the position corresponding to position 1013 of SEQ ID NO: 712.

[0476] In some embodiments, the SluCas9 comprises an amino acid other than an R at the position corresponding to position 246 of SEQ ID NO: 712. In some embodiments, the SluCas9 comprises an amino acid other than an N at the position corresponding to position 414 of SEQ ID NO: 712. In some embodiments, the SluCas9 comprises an amino acid other than a T at the position corresponding to position 420 of SEQ ID NO: 712. In some embodiments, the SluCas9 comprises an amino acid other than an R at the position corresponding to position 655 of SEQ ID NO: 712. In some embodiments, the SluCas9 comprises an amino acid other than an R at the position corresponding to position 246 of SEQ ID NO: 712; an amino acid other than an N at the position corresponding to position 414 of SEQ ID NO: 712; an amino acid other than a T at the position corresponding to position 420 of SEQ ID NO: 712; and an amino acid other than an R at the position corresponding to position 655 of SEQ ID NO: 712. In some embodiments, the SluCas9 comprises an A at the position corresponding to position 246 of SEQ ID NO: 712. In some embodiments, the SluCas9 comprises an A at the position corresponding to position 414 of SEQ ID NO: 712. In some embodiments, the SluCas9 comprises an A at the position corresponding to position 420 of SEQ ID NO: 712. In some embodiments, the SluCas9 comprises an A at the position corresponding to position 655 of SEQ ID NO: 712. In some embodiments, the SluCas9 comprises an A at the position corresponding to position 246 of SEQ ID NO: 712; an A at the position corresponding to position 414 of SEQ ID NO: 712; an A at the position corresponding to position 420 of SEQ ID NO: 712; and an A at the position corresponding to position 655 of SEQ ID NO: 712.

[0477] In some embodiments, the SluCas9 comprises an amino acid other than an R at the position corresponding to position 246 of SEQ ID NO: 712; an amino acid other than an N at the position corresponding to position 414 of SEQ ID NO: 712; an amino acid other than a T at the position corresponding to position 420 of SEQ ID NO: 712; an amino acid other than an R at the position corresponding to position 655 of SEQ ID NO: 712; an amino acid other than an Q at the position corresponding to position 781 of SEQ ID NO: 712; a K at the position corresponding to position 966 of SEQ ID NO: 712; and an amino acid other than an R at the position corresponding to position 1013 of SEQ ID NO: 712. In some embodiments, the SluCas9 comprises an A at the position corresponding to position 246 of SEQ ID NO: 712; an A at the position corresponding to position 414 of SEQ ID NO: 712; an A at the position corresponding to position 420 of SEQ ID NO: 712; an A at the position corresponding to position 655 of SEQ ID NO: 712; a K at the position corresponding to position 781 of SEQ ID NO: 712; a K at the position corresponding to position 966 of SEQ ID NO: 712; and an H at the position corresponding to position 1013 of SEQ ID NO: 712.

[0478] In some embodiments, the SluCas9 comprises an amino acid sequence that is at least 80%, 85%, 90%, 91%, 92%, 93%, 94%, 95%, 96%, 97%, 98%, 99% or 100% identical to the sequence of SEQ ID NO: 718 (designated herein as SluCas9-KH or SLUCAS9KH):

NQKFILGLDIGITSVGYGLIDYETKNIIDAGVRLFPEANVENNEGRRSKRGSRRLKRRRIHRLE
RVKKLLEDYNLLDQSQIPQSTNPYAIRVKGLSEALSKDELVIALLHIAKRRGIHKIDVIDSNDD
VGNELSTKEQLNKNSKLLKDKFVCQIQLERMNEGQVRGEKNRFKTADIIKEIIQLLNVQKNFH
QLDENFINKYIELVEMRREYFEGPGKGSPYGWEGDPKAWYETLMGHCTYFPDELRSVKYAY
SADLFNALNDLNNLVIQRDGLSKLEYHEKYHIIENVFKQKKKPTLKQIANEINVNPEDIKGYRI
TKSGKPQFTEFKLYHDLKSVLFDQSILENEDVLDQIAEILTIYQDKDSIKSKLTELDILLNEEDK
ENIAQLTGYTGTHRLSLKCIRLVLEEQWYSSRNQMEIFTHLNIKPKKINLTAANKIPKAMIDEF
ILSPVVKRTFGQAINLINKIIEKYGVPEDIIIELARENNSKDKQKFINEMQKKNENTRKRINEIIG
KYGNQNAKRLVEKIRLHDEQEGKCLYSLESIPLEDLLNNPNHYEVDHIIPRSVSFDNSYHNKV
LVKQSENSKKSNLTPYQYFNSGKSKLSYNQFKQHILNLSKSQDRISKKKKEYLLEERDINKFE
VQKEFINRNLVDTRYATRELTNYLKAYFSANNMNVKVKTINGSFTDYLRKVWKFKKERNH
GYKHHAEDALIIANADFLFKENKKLKAVNSVLEKPEIETKQLDIQVDSEDNYSEMFIIPKQVQ
DIKDFRNFKYSHRVDKKPNRKLINDTLYSTRKKDNSTYIVQTIKDIYAKDNTTLKKQFDKSPE
KFLMYQHDPRTFEKLEVIMKQYANEKNPLAKYHEETGEYLTKYSKKNNGPIVKSLKYIGNK
LGSHLDVTHQFKSSTKKLVKLSIKPYRFDVYLTDKGYKFITISYLDVLKKDNYYYIPEQKYDK
LKLGKAIDKNAKFIASFYKNDLIKLDGEIYKIIGVNSDTRNMIELDLPDIRYKEYCELNNIKGEP
HIKKTIGKKVNSIEKLTTDVLGNVFTNTQYTKPQLLFKRGN.

[0479] In some embodiments, the SluCas9 comprises an amino acid sequence that is at least 80%, 85%, 90%, 91%, 92%, 93%, 94%, 95%, 96%, 97%, 98%, 99% or 100% identical to the sequence of SEQ ID NO: 719 (designated herein as SluCas9-HF):

NQKFILGLDIGITSVGYGLIDYETKNIIDAGVRLFPEANVENNEGRRSKRGSRRLKRRRIHRLE
RVKKLLEDYNLLDQSQIPQSTNPYAIRVKGLSEALSKDELVIALLHIAKRRGIHKIDVIDSNDD
VGNELSTKEQLNKNSKLLKDKFVCQIQLERMNEGQVRGEKNRFKTADIIKEIIQLLNVQKNFH
QLDENFINKYIELVEMRREYFEGPGKGSPYGWEGDPKAWYETLMGHCTYFPDELASVKYAY
SADLFNALNDLNNLVIQRDGLSKLEYHEKYHIIENVFKQKKKPTLKQIANEINVNPEDIKGYRI
TKSGKPQFTEFKLYHDLKSVLFDQSILENEDVLDQIAEILTIYQDKDSIKSKLTELDILLNEEDK
ENIAQLTGYTGTHRLSLKCIRLVLEEQWYSSRAQMEIFAHLNIKPKKINLTAANKIPKAMIDEF
ILSPVVKRTFGQAINLINKIIEKYGVPEDIIIELARENNSKDKQKFINEMQKKNENTRKRINEIIG
KYGNQNAKRLVEKIRLHDEQEGKCLYSLESIPLEDLLNNPNHYEVDHIIPRSVSFDNSYHNKV
LVKQSENSKKSNLTPYQYFNSGKSKLSYNQFKQHILNLSKSQDRISKKKKEYLLEERDINKFE
VQKEFINRNLVDTRYATAELTNYLKAYFSANNMNVKVKTINGSFTDYLRKVWKFKKERNH
GYKHHAEDALIIANADFLFKENKKLKAVNSVLEKPEIETKQLDIQVDSEDNYSEMFIIPKQVQ
DIKDFRNFKYSHRVDKKPNRQLINDTLYSTRKKDNSTYIVQTIKDIYAKDNTTLKKQFDKSPE
KFLMYQHDPRTFEKLEVIMKQYANEKNPLAKYHEETGEYLTKYSKKNNGPIVKSLKYIGNK
LGSHLDVTHQFKSSTKKLVKLSIKPYRFDVYLTDKGYKFITISYLDVLKKDNYYYIPEQKYDK
LKLGKAIDKNAKFIASFYKNDLIKLDGEIYKIIGVNSDTRNMIELDLPDIRYKEYCELNNIKGEP
RIKKTIGKKVNSIEKLTTDVLGNVFTNTQYTKPQLLFKRGN.

[0480] In some embodiments, the SluCas9 comprises an amino acid sequence that is at least 80%, 85%, 90%, 91%, 92%, 93%, 94%, 95%, 96%, 97%, 98%, 99% or 100% identical to the sequence of SEQ ID NO: 720 (designated herein as SluCas9-HF-KH):

NQKFILGLDIGITSVGYGLIDYETKNIIDAGVRLFPEANVENNEGRRSKRGSRRLKRRRIHRLE
RVKKLLEDYNLLDQSQIPQSTNPYAIRVKGLSEALSKDELVIALLHIAKRRGIHKIDVIDSNDD
VGNELSTKEQLNKNSKLLKDKFVCQIQLERMNEGQVRGEKNRFKTADIIKEIIQLLNVQKNFH
QLDENFINKYIELVEMRREYFEGPGKGSPYGWEGDPKAWYETLMGHCTYFPDELASVKYAY
SADLFNALNDLNNLVIQRDGLSKLEYHEKYHIIENVFKQKKKPTLKQIANEINVNPEDIKGYRI
TKSGKPQFTEFKLYHDLKSVLFDQSILENEDVLDQIAEILTIYQDKDSIKSKLTELDILLNEEDK
ENIAQLTGYTGTHRLSLKCIRLVLEEQWYSSRAQMEIFAHLNIKPKKINLTAANKIPKAMIDEF
ILSPVVKRTFGQAINLINKIIEKYGVPEDIIIELARENNSKDKQKFINEMQKKNENTRKRINEIIG
KYGNQNAKRLVEKIRLHDEQEGKCLYSLESIPLEDLLNNPNHYEVDHIIPRSVSFDNSYHNKV
LVKQSENSKKSNLTPYQYFNSGKSKLSYNQFKQHILNLSKSQDRISKKKKEYLLEERDINKFE
VQKEFINRNLVDTRYATAELTNYLKAYFSANNMNVKVKTINGSFTDYLRKVWKFKKERNH
GYKHHAEDALIIANADFLFKENKKLKAVNSVLEKPEIETKQLDIQVDSEDNYSEMFIIPKQVQ
DIKDFRNFKYSHRVDKKPNRKLINDTLYSTRKKDNSTYIVQTIKDIYAKDNTTLKKQFDKSPE
KFLMYQHDPRTFEKLEVIMKQYANEKNPLAKYHEETGEYLTKYSKKNNGPIVKSLKYIGNK
LGSHLDVTHQFKSSTKKLVKLSIKPYRFDVYLTDKGYKFITISYLDVLKKDNYYYIPEQKYDK
LKLGKAIDKNAKFIASFYKNDLIKLDGEIYKIIGVNSDTRNMIELDLPDIRYKEYCELNNIKGEP
HIKKTIGKKVNSIEKLTTDVLGNVFTNTQYTKPQLLFKRGN.

[0481] In some embodiments, the Cas protein is any of the engineered Cas proteins disclosed in Schmidt et al., 2021, Nature Communications, “Improved CRISPR genome editing using small highly active and specific engineered RNA-guided nucleases.”

[0482] In some embodiments, the Cas9 comprises an amino acid sequence that is at least 80%, 85%, 90%, 91%, 92%, 93%, 94%, 95%, 96%, 97%, 98%, 99% or 100% identical to the sequence of SEQ ID NO: 7021 (designated herein as sRGN1):

MNQKFILGLDIGITSVGYGLIDYETKNIIDAGVRLFPEANVENNEGRRSKRGSRRLKRRRIHRL
DRVKHLLAEYDLLDLTNIPKSTNPYQTRVKGLNEKLSKDELVIALLHIAKRRGIHNVDVAAD
KEETASDSLSTKDQINKNAKFLESRYVCELQKERLENEGHVRGVENRFLTKDIVREAKKIIDT
QMQYYPEIDETFKEKYISLVETRREYFEGPGKGSPFGWEGNIKKWFEQMMGHCTYFPEELRS
VKYSYSAELFNALNDLNNLVITRDEDAKLNYGEKFQIIENVFKQKKTPNLKQIAIEIGVHETEI
KGYRVNKSGTPEFTEFKLYHDLKSIVFDKSILENEAILDQIAEILTIYQDEQSIKEELNKLPEILN
EQDKAEIAKLIGYNGTHRLSLKCIHLINEELWQTSRNQMEIFNYLNIKPNKVDLSEQNKIPKD
MVNDFILSPVVKRTFIQSINVINKVIEKYGIPEDIIIELARENNSDDRKKFINNLQKKNEATRKRI
NEIIGQTGNQNAKRIVEKIRLHDQQEGKCLYSLKDIPLEDLLRNPNNYDIDHIIPRSVSFDDSM
HNKVLVRREQNAKKNNQTPYQYLTSGYADIKYSVFKQHVLNLAENKDRMTKKKREYLLEE
RDINKFEVQKEFINRNLVDTRYATRELTNYLKAYFSANNMNVKVKTINGSFTDYLRKVWKF
KKERNHGYKHHAEDALIIANADFLFKENKKLKAVNSVLEKPEIETKQLDIQVDSEDNYSEMFI
IPKQVQDIKDFRNFKYSHRVDKKPNRQLINDTLYSTRKKDNSTYIVQTIKDIYAKDNTTLKKQ
FDKSPEKFLMYQHDPRTFEKLEVIMKQYANEKNPLAKYHEETGEYLTKYSKKNNGPIVKSLK
YIGNKLGSHLDVTHQFKSSTKKLVKLSIKPYRFDVYLTDKGYKFITISYLDVLKKDNYYYIPE
QKYDKLKLGKAIDKNAKFIASFYKNDLIKLDGEIYKIIGVNSDTRNMIELDLPDIRYKEYCELN
NIKGEPRIKKTIGKKVNSIEKLTTDVLGNVFTNTQYTKPQLLFKRGN.

[0483] In some embodiments, the Cas9 comprises an amino acid sequence that is at least 80%, 85%, 90%, 91%, 92%, 93%, 94%, 95%, 96%, 97%, 98%, 99% or 100% identical to the sequence of SEQ ID NO: 7022 (designated herein as sRGN2):

MNQKFILGLDIGITSVGYGLIDYETKNIIDAGVRLFPEANVENNEGRRSKRGSRRLKRRRIHRL
ERVKSLLSEYKIISGLAPTNNQPYNIRVKGLTEQLTKDELAVALLHIAKRRGIHKIDVIDSNDD
VGNELSTKEQLNKNSKLLKDKFVCQIQLERMNEGQVRGEKNRFKTADIIKEIIQLLNVQKNFH
QLDENFINKYIELVEMRREYFEGPGQGSPFGWNGDLKKWYEMLMGHCTYFPQELRSVKYA
YSADLFNALNDLNNLIIQRDNSEKLEYHEKYHIIENVFKQKKKPTLKQIAKEIGVNPEDIKGYR
ITKSGTPEFTEFKLYHDLKSVLFDQSILENEDVLDQIAEILTIYQDKDSIKSKLTELDILLNEEDK
ENIAQLTGYNGTHRLSLKCIRLVLEEQWYSSRNQMEIFTHLNIKPKKINLTAANKIPKAMIDEF
ILSPVVKRTFIQSINVINKVIEKYGIPEDIIIELARENNSDDRKKFINNLQKKNEATRKRINEIIGQ
TGNQNAKRIVEKIRLHDQQEGKCLYSLESIALMDLLNNPQNYEVDHIIPRSVAFDNSIHNKVL
VKQIENSKKGNRTPYQYLNSSDAKLSYNQFKQHILNLSKSKDRISKKKKDYLLEERDINKFEV
QKEFINRNLVDTRYATRELTSYLKAYFSANNMDVKVKTINGSFTNHLRKVWRFDKYRNHGY
KHHAEDALIIANADFLFKENKKLKAVNSVLEKPEIETKQLDIQVDSEDNYSEMFIIPKQVQDIK
DFRNFKYSHRVDKKPNRQLINDTLYSTRKKDNSTYIVQTIKDIYAKDNTTLKKQFDKSPEKFL
MYQHDPRTFEKLEVIMKQYANEKNPLAKYHEETGEYLTKYSKKNNGPIVKSLKYIGNKLGS
HLDVTHQFKSSTKKLVKLSIKPYRFDVYLTDKGYKFITISYLDVLKKDNYYYIPEQKYDKLKL
GKAIDKNAKFIASFYKNDLIKLDGEIYKIIGVNSDTRNMIELDLPDIRYKEYCELNNIKGEPRIK
KTIGKKVNSIEKLTTDVLGNVFTNTQYTKPQLLFKRGN.

[0484] In some embodiments, the Cas9 comprises an amino acid sequence that is at least 80%, 85%, 90%, 91%, 92%, 93%, 94%, 95%, 96%, 97%, 98%, 99% or 100% identical to the sequence of SEQ ID NO: 7023 (designated herein as sRGN3):

MNQKFILGLDIGITSVGYGLIDYETKNIIDAGVRLFPEANVENNEGRRSKRGSRRLKRRRIHRL
ERVKLLLTEYDLINKEQIPTSNNPYQIRVKGLSEILSKDELAIALLHLAKRRGIHNVDVAADKE
ETASDSLSTKDQINKNAKFLESRYVCELQKERLENEGHVRGVENRFLTKDIVREAKKIIDTQM
QYYPEIDETFKEKYISLVETRREYFEGPGQGSPFGWNGDLKKWYEMLMGHCTYFPQELRSV
KYAYSADLFNALNDLNNLIIQRDNSEKLEYHEKYHIIENVFKQKKKPTLKQIAKEIGVNPEDIK
GYRITKSGTPEFTSFKLFHDLKKVVKDHAILDDIDLLNQIAEILTIYQDKDSIVAELGQLEYLM
SEADKQSISELTGYTGTHSLSLKCMNMIIDELWHSSMNQMEVFTYLNMRPKKYELKGYQRIP
TDMIDDAILSPVVKRTFIQSINVINKVIEKYGIPEDIIIELARENNSDDRKKFINNLQKKNEATRK
RINEIIGQTGNQNAKRIVEKIRLHDQQEGKCLYSLESIPLEDLLNNPNHYEVDHIIPRSVSFDNS
YHNKVLVKQSENSKKSNLTPYQYFNSGKSKLSYNQFKQHILNLSKSQDRISKKKKEYLLEER
DINKFEVQKEFINRNLVDTRYATRELTNYLKAYFSANNMNVKVKTINGSFTDYLRKVWKFK
KERNHGYKHHAEDALIIANADFLFKENKKLKAVNSVLEKPEIETKQLDIQVDSEDNYSEMFII
PKQVQDIKDFRNFKYSHRVDKKPNRQLINDTLYSTRKKDNSTYIVQTIKDIYAKDNTTLKKQF
DKSPEKFLMYQHDPRTFEKLEVIMKQYANEKNPLAKYHEETGEYLTKYSKKNNGPIVKSLK
YIGNKLGSHLDVTHQFKSSTKKLVKLSIKPYRFDVYLTDKGYKFITISYLDVLKKDNYYYIPE
QKYDKLKLGKAIDKNAKFIASFYKNDLIKLDGEIYKIIGVNSDTRNMIELDLPDIRYKEYCELN
NIKGEPRIKKTIGKKVNSIEKLTTDVLGNVFTNTQYTKPQLLFKRGN.

[0485] In some embodiments, the Cas9 comprises an amino acid sequence that is at least 80%, 85%, 90%, 91%, 92%, 93%, 94%, 95%, 96%, 97%, 98%, 99% or 100% identical to the sequence of SEQ ID NO: 7024 (designated herein as sRGN3.1):

MNQKFILGLDIGITSVGYGLIDYETKNIIDAGVRLFPEANVENNEGRRSKRGSRRLKRRRIHRL
ERVKLLLTEYDLINKEQIPTSNNPYQIRVKGLSEILSKDELAIALLHLAKRRGIHNVDVAADKE
ETASDSLSTKDQINKNAKFLESRYVCELQKERLENEGHVRGVENRFLTKDIVREAKKIIDTQM
QYYPEIDETFKEKYISLVETRREYFEGPGQGSPFGWNGDLKKWYEMLMGHCTYFPQELRSV
KYAYSADLFNALNDLNNLIIQRDNSEKLEYHEKYHIIENVFKQKKKPTLKQIAKEIGVNPEDIK
GYRITKSGTPEFTSFKLFHDLKKVVKDHAILDDIDLLNQIAEILTIYQDKDSIVAELGQLEYLM
SEADKQSISELTGYTGTHSLSLKCMNMIIDELWHSSMNQMEVFTYLNMRPKKYELKGYQRIP
TDMIDDAILSPVVKRTFIQSINVINKVIEKYGIPEDIIIELARENNSDDRKKFINNLQKKNEATRK
RINEIIGQTGNQNAKRIVEKIRLHDQQEGKCLYSLESIPLEDLLNNPNHYEVDHIIPRSVSFDNS
YHNKVLVKQSENSKKSNLTPYQYFNSGKSKLSYNQFKQHILNLSKSQDRISKKKKEYLLEER
DINKFEVQKEFINRNLVDTRYATRELTNYLKAYFSANNMNVKVKTINGSFTDYLRKVWKFK
KERNHGYKHHAEDALIIANADFLFKENKKLKAVNSVLEKPEIETKQLDIQVDSEDNYSEMFII
PKQVQDIKDFRNFKYSHRVDKKPNRQLINDTLYSTRKKDNSTYIVQTIKDIYAKDNTTLKKQF
DKSPEKFLMYQHDPRTFEKLEVIMKQYANEKNPLAKYHEETGEYLTKYSKKNNGPIVKSLK
YIGNKLGSHLDVTHQFKSSTKKLVKLSIKNYRFDVYLTEKGYKFVTIAYLNVFKKDNYYYIP
KDKYQELKEKKKIKDTDQFIASFYKNDLIKLNGDLYKIIGVNSDDRNIIELDYYDIKYKDYCEI
NNIKGEPRIKKTIGKKTESIEKFTTDVLGNLYLHSTEKAPQLIFKRGL.

[0486] In some embodiments, the Cas9 comprises an amino acid sequence that is at least 80%, 85%, 90%, 91%, 92%, 93%, 94%, 95%, 96%, 97%, 98%, 99% or 100% identical to the sequence of SEQ ID NO: 7025 (designated herein as sRGN3.2):

MNQKFILGLDIGITSVGYGLIDYETKNIIDAGVRLFPEANVENNEGRRSKRGSRRLKRRRIHRL
ERVKLLLTEYDLINKEQIPTSNNPYQIRVKGLSEILSKDELAIALLHLAKRRGIHNVDVAADKE
ETASDSLSTKDQINKNAKFLESRYVCELQKERLENEGHVRGVENRFLTKDIVREAKKIIDTQM
QYYPEIDETFKEKYISLVETRREYFEGPGQGSPFGWNGDLKKWYEMLMGHCTYFPQELRSV
KYAYSADLFNALNDLNNLIIQRDNSEKLEYHEKYHIIENVFKQKKKPTLKQIAKEIGVNPEDIK
GYRITKSGTPEFTSFKLFHDLKKVVKDHAILDDIDLLNQIAEILTIYQDKDSIVAELGQLEYLM
SEADKQSISELTGYTGTHSLSLKCMNMIIDELWHSSMNQMEVFTYLNMRPKKYELKGYQRIP
TDMIDDAILSPVVKRTFIQSINVINKVIEKYGIPEDIIIELARENNSDDRKKFINNLQKKNEATRK
RINEIIGQTGNQNAKRIVEKIRLHDQQEGKCLYSLESIPLEDLLNNPNHYEVDHIIPRSVSFDNS
YHNKVLVKQSENSKKSNLTPYQYFNSGKSKLSYNQFKQHILNLSKSQDRISKKKKEYLLEER
DINKFEVQKEFINRNLVDTRYATRELTNYLKAYFSANNMNVKVKTINGSFTDYLRKVWKFK
KERNHGYKHHAEDALIIANADFLFKENKKLKAVNSVLEKPEIETKQLDIQVDSEDNYSEMFII
PKQVQDIKDFRNFKFSHRVDKKPNRQLINDTLYSTRMKDEHDYIVQTITDIYGKDNTNLKKQ
FNKNPEKFLMYQNDPKTFEKLSIIMKQYSDEKNPLAKYYEETGEYLTKYSKKNNGPIVKKIK
LLGNKVGNHLDVTNKYENSTKKLVKLSIKNYRFDVYLTEKGYKFVTIAYLNVFKKDNYYYI
PKDKYQELKEKKKIKDTDQFIASFYKNDLIKLNGDLYKIIGVNSDDRNIIELDYYDIKYKDYC
EINNIKGEPRIKKTIGKKTESIEKFTTDVLGNLYLHSTEKAPQLIFKRGL.

[0487] In some embodiments, the Cas9 comprises an amino acid sequence that is at least 80%, 85%, 90%, 91%, 92%, 93%, 94%, 95%, 96%, 97%, 98%, 99% or 100% identical to the sequence of SEQ ID NO: 7026 (designated herein as sRGN3.3):

MNQKFILGLDIGITSVGYGLIDYETKNIIDAGVRLFPEANVENNEGRRSKRGSRRLKRRRIHRL
ERVKLLLTEYDLINKEQIPTSNNPYQIRVKGLSEILSKDELAIALLHLAKRRGIHNVDVAADKE
ETASDSLSTKDQINKNAKFLESRYVCELQKERLENEGHVRGVENRFLTKDIVREAKKIIDTQM
QYYPEIDETFKEKYISLVETRREYFEGPGQGSPFGWNGDLKKWYEMLMGHCTYFPQELRSV
KYAYSADLFNALNDLNNLIIQRDNSEKLEYHEKYHIIENVFKQKKKPTLKQIAKEIGVNPEDIK
GYRITKSGTPEFTSFKLFHDLKKVVKDHAILDDIDLLNQIAEILTIYQDKDSIVAELGQLEYLM
SEADKQSISELTGYTGTHSLSLKCMNMIIDELWHSSMNQMEVFTYLNMRPKKYELKGYQRIP
TDMIDDAILSPVVKRTFIQSINVINKVIEKYGIPEDIIIELARENNSDDRKKFINNLQKKNEATRK
RINEIIGQTGNQNAKRIVEKIRLHDQQEGKCLYSLESIPLEDLLNNPNHYEVDHIIPRSVSFDNS
YHNKVLVKQSENSKKSNLTPYQYFNSGKSKLSYNQFKQHILNLSKSQDRISKKKKEYLLEER
DINKFEVQKEFINRNLVDTRYATRELTSYLKAYFSANNMDVKVKTINGSFTNHLRKVWRFD
KYRNHGYKHHAEDALIIANADFLFKENKKLQNTNKILEKPTIENNTKKVTVEKEEDYNNVFE
TPKLVEDIKQYRDYKF SHRVDKKPNRQLINDTLYSTRMKDEHDYIVQTITDIYGKDNTNLKK
QFNKNPEKFLMYQNDPKTFEKLSIIMKQYSDEKNPLAKYYEETGEYLTKYSKKNNGPIVKKI
KLLGNKVGNHLDVTNKYENSTKKLVKLSIKNYRFDVYLTEKGYKFVTIAYLNVFKKDNYYY
IPKDKYQELKEKKKIKDTDQFIASFYKNDLIKLNGDLYKIIGVNSDDRNIIELDYYDIKYKDYC
EINNIKGEPRIKKTIGKKTESIEKFTTDVLGNLYLHSTEKAPQLIFKRGL.

[0488] In some embodiments, the Cas9 comprises an amino acid sequence that is at least 80%, 85%, 90%, 91%, 92%, 93%, 94%, 95%, 96%, 97%, 98%, 99% or 100% identical to the sequence of SEQ ID NO: 7027 (designated herein as sRGN4):

MNQKFILGLDIGITSVGYGLIDYETKNIIDAGVRLFPEANVENNEGRRSKRGSRRLKRRRIHRL
ERVKKLLEDYNLLDQSQIPQSTNPYAIRVKGLSEALSKDELVIALLHIAKRRGIHNINVSSEDE
DASNELSTKEQINRNNKLLKDKYVCEVQLQRLKEGQIRGEKNRFKTTDILKEIDQLLKVQKD
YHNLDIDFINQYKEIVETRREYFEGPGKGSPYGWEGDPKAWYETLMGHCTYFPDELRSVKY
AYSADLFNALNDLNNLVIQRDGLSKLEYHEKYHIIENVFKQKKKPTLKQIANEINVNPEDIKG
YRITKSGKPEFTSFKLFHDLKKVVKDHAILDDIDLLNQIAEILTIYQDKDSIVAELGQLEYLMS
EADKQSISELTGYTGTHSLSLKCMNMIIDELWHSSMNQMEVFTYLNMRPKKYELKGYQRIPT
DMIDDAILSPVVKRTFIQSINVINKVIEKYGIPEDIIIELARENNSDDRKKFINNLQKKNEATRKR
INEIIGQTGNQNAKRIVEKIRLHDQQEGKCLYSLESIPLEDLLNNPNHYEVDHIIPRSVSFDNSY
HNKVLVKQSENSKKSNLTPYQYFNSGKSKLSYNQFKQHILNLSKSQDRISKKKKEYLLEERDI
NKFEVQKEFINRNLVDTRYATRELTNYLKAYFSANNMNVKVKTINGSFTDYLRKVWKFKKE
RNHGYKHHAEDALIIANADFLFKENKKLKAVNSVLEKPEIETKQLDIQVDSEDNYSEMFIIPK
QVQDIKDFRNFKYSHRVDKKPNRQLINDTLYSTRKKDNSTYIVQTIKDIYAKDNTTLKKQFD
KSPEKFLMYQHDPRTFEKLEVIMKQYANEKNPLAKYHEETGEYLTKYSKKNNGPIVKSLKYI
GNKLGSHLDVTHQFKSSTKKLVKLSIKPYRFDVYLTDKGYKFITISYLDVLKKDNYYYIPEQK
YDKLKLGKAIDKNAKFIASFYKNDLIKLDGEIYKIIGVNSDTRNMIELDLPDIRYKEYCELNNI
KGEPRIKKTIGKKVNSIEKLTTDVLGNVFTNTQYTKPQLLFKRGN.

[0489] In some embodiments, the Cas9 comprises an amino acid sequence that is at least 80%, 85%, 90%, 91%, 92%, 93%, 94%, 95%, 96%, 97%, 98%, 99% or 100% identical to the sequence of SEQ ID NO: 7028 (designated herein as Staphylococcus hyicus Cas9 or ShyCas9):

MNNYILGLDIGITSVGYGIVDSDTREIKDAGVRLFPEANVDNNEGRRSKRGARRLKR
RRIHRLDRVKHLLAEYDLLDLTNIPKSTNPYQTRVKGLNEKLSKDELVIALLHIAKRRGIHNV
NVMMDDNDSGNELSTKDQLKKNAKALSDKYVCELQLERFEQDYKVRGEKNRFKTEDFVRE
ARKLLETQSKFFEIDQTFIMRYIELIETRREYFEGPGKGSPFGWEGNIKKWFEQMMGHCTYFP
EELRSVKYSYSAELFNALNDLNNLVITRDEDAKLNYGEKFQIIENVFKQKKTPNLKQIAIEIGV
HETEIKGYRVNKSGKPEFTQFKLYHDLKNIFKDPKYLNDIQLMDNIAEIITIYQDAESIIKELNQ
LPELLSEREKEKISALSGYSGTHRLSLKCINLLLDDLWESSLNQMELFTKLNLKPKKIDLSQQH
KIPSKLVDDFILSPVVKRAFIQSIQVVNAIIDKYGLPEDIIIELARENNSDDRRKFLNQLQKQNE
ETRKQVEKVLREYGNDNAKRIVQKIKLHNMQEGKCLYSLKDIPLEDLLRNPHHYEVDHIIPRS
VAFDNSMHNKVLVRADENSKKGNRTPYQYLNSSESSLSYNEFKQHILNLSKTKDRITKKKRE
YLLEERDINKFDVQKEFINRNLVDTRYATRELTSLLKAYFSANNLDVKVKTINGSFTNYLRKV
WKFDKDRNKGYKHHAEDALIIANADFLFKHNKKLRNINKVLDAPSKEVDKKRVTVQSEDEY
NQIFEDTQKAQAIKKFEIRKFSHRVDKKPNRQLINDTLYSTRNIDGIEYVVESIKDIYSVNNDK
VKTKFKKDPHRLLMYRNDPQTFEKFEKVFKQYESEKNPFAKYYEETGEKIRKFSKTGQGPYI
NKIKYLRERLGRHCDVTNKYINSRNKIVQLKIYSYRFDIYQYGNNYKMITISYIDLEQKSNYY
YISREKYEQKKKDKQIDDSYKFIGSFYKNDIINYNGEMYRVIGVNDSEKNKIQLDMIDISIKDY
MELNNIKKTGVIYKTIGKSTTHIEKYTTDILGNLYKAAPPKKPQLIFK.

[0490] In some embodiments, the Cas9 comprises an amino acid sequence that is at least 80%, 85%, 90%, 91%, 92%, 93%, 94%, 95%, 96%, 97%, 98%, 99% or 100% identical to the sequence of SEQ ID NO: 7029 (designated herein as Staphylococcus microti Cas9 or Smi Cas9):

MEKDYILGLDIGIGSVGYGLIDYDTKSIIDAGVRLFPEANADNNLGRRAKRGARRLKRRRIHR
LERVKSLLSEYKIISGLAPTNNQPYNIRVKGLTEQLTKDELAVALLHIAKRRGIHNVDVAADK
EETASDSLSTKDQINKNAKFLESRYVCELQKERLENEGHVRGVENRFLTKDIVREAKKIIDTQ
MQYYPEIDETFKEKYISLVETRREYYEGPGKGSPYGWDADVKKWYQLMMGHCTYFPVEFRS
VKYAYTADLYNALNDLNNLTIARDDNPKLEYHEKYHIIENVFKQKRNPTLKQIAKEIGVNDI
NISGYRVTKSGKPQFTSFKLFHDLKKVVKDHAILDDIDLLNQIAEILTIYQDKDSIVAELGQLE
YLMSEADKQSISELTGYTGTHSLSLKCMNMIIDELWHSSMNQMEVFTYLNMRPKKYELKGY
QRIPTDMIDDAILSPVVKRSFKQAIGVVNAIIKKYGLPKDIIIELARESNSAEKSRYLRAIQKKN
EKTRERIEAIIKEYGNENAKGLVQKIKLHDAQEGKCLYSLKDIPLEDLLRNPNNYDIDHIIPRS
VSFDDSMHNKVLVRREQNAKKNNQTPYQYLTSGYADIKYSVFKQHVLNLAENKDRMTKKK
REYLLEERNINKYDVQKEFINRNLVDTRYTTRELTTLLKTYFTINNLDVKVKTINGSFTDFLR
KRWGFKKNRDEGYKHHAEDALIIANADYLFKEHKLLKEIKDVSDLAGDERNSNVKDEDQYE
EVFGGYFKIEDIKKYKIKKFSHRVDKKPNRQLINDTIYSTRVKDDKRYLINTLKNLYDKSNGD
LKERMQKDPESLLMYHHDPQTFEKLKIVMSQYENEKNPLAKYFEETGQYLTKYAKHDNGPA
IHKIKYYGNKLVEHLDITKNYHNPQNKVVQLSQKSFRFDVYQTDKGYKFISIAYLTLKNEKN
YYAISQEKYDQLKSEKKISNNAVFIGSFYTSDIIEINNEKFRVIGVNSDKNNLIEVDRIDIRQKEF
IELEEEKKNNRIKVTIGRKTTNIEKFHTDILGNMYKSKRPKAPQLVFKKG.

[0491] In some embodiments, the Cas9 comprises an amino acid sequence that is at least 80%, 85%, 90%, 91%, 92%, 93%, 94%, 95%, 96%, 97%, 98%, 99% or 100% identical to the sequence of SEQ ID NO: 7030 (designated herein as Staphylococcus pasteuri Cas9 or Spa Cas9):

MKEKYILGLDLGITSVGYGIINFETKKIIDAGVRLFPEANVDNNEGRRSKRGSRRLKRRRIHRL
ERVKLLLTEYDLINKEQIPTSNNPYQIRVKGLSEILSKDELAIALLHLAKRRGIHNINVSSEDED
ASNELSTKEQINRNNKLLKDKYVCEVQLQRLKEGQIRGEKNRFKTTDILKEIDQLLKVQKDY
HNLDIDFINQYKEIVETRREYFEGPGQGSPFGWNGDLKKWYEMLMGHCTYFPQELRSVKYA
YSADLFNALNDLNNLIIQRDNSEKLEYHEKYHIIENVFKQKKKPTLKQIAKEIGVNPEDIKGYR
ITKSGTPQFTEFKLYHDLKSIVFDKSILENEAILDQIAEILTIYQDEQSIKEELNKLPEILNEQDK
AEIAKLIGYNGTHRLSLKCIHLINEELWQTSRNQMEIFNYLNIKPNKVDLSEQNKIPKDMVND
FILSPVVKRTFIQSINVINKVIEKYGIPEDIIIELARENNSDDRKKFINNLQKKNEATRKRINEIIG
QTGNQNAKRIVEKIRLHDQQEGKCLYSLESIALMDLLNNPQNYEVDHIIPRSVAFDNSIHNKV
LVKQIENSKKGNRTPYQYLNSSDAKLSYNQFKQHILNLSKSKDRISKKKKDYLLEERDINKFE
VQKEFINRNLVDTRYATRELTSYLKAYFSANNMDVKVKTINGSFTNHLRKVWRFDKYRNHG
YKHHAEDALIIANADFLFKENKKLQNTNKILEKPTIENNTKKVTVEKEEDYNNVFETPKLVED
IKQYRDYKFSHRVDKKPNRQLINDTLYSTRMKDEHDYIVQTITDIYGKDNTNLKKQFNKNPE
KFLMYQNDPKTFEKLSIIMKQYSDEKNPLAKYYEETGEYLTKYSKKNNGPIVKKIKLLGNKV
GNHLDVTNKYENSTKKLVKLSIKNYRFDVYLTEKGYKFVTIAYLNVFKKDNYYYIPKDKYQ
ELKEKKKIKDTDQFIASFYKNDLIKLNGDLYKIIGVNSDDRNIIELDYYDIKYKDYCEINNIKG
EPRIKKTIGKKTESIEKFTTDVLGNLYLHSTEKAPQLIFKRGL.

[0492] In some embodiments, the Cas protein comprises an amino acid sequence that is at least 80%, 85%, 90%, 91%, 92%, 93%, 94%, 95%, 96%, 97%, 98%, 99% or 100% identical to the sequence of SEQ ID NO: 7031 (designated herein as Cas12i1):

MSNKEKNASETRKAYTTKMIPRSHDRMKLLGNFMDYLMDGTPIFFELWNQFGGGIDRDIISG
TANKDKISDDLLLAVNWFKVMPINSKPQGVSPSNLANLFQQYSGSEPDIQAQEYFASNFDTE
KHQWKDMRVEYERLLAELQLSRSDMHHDLKLMYKEKCIGLSLSTAHYITSVMFGTGAKNN
RQTKHQFYSKVIQLLEESTQINSVEQLASIILKAGDCDSYRKLRIRCSRKGATPSILKIVQDYEL
GTNHDDEVNVPSLIANLKEKLGRFEYECEWKCMEKIKAFLASKVGPYYLGSYSAMLENALS
PIKGMTTKNCKFVLKQIDAKNDIKYENEPFGKIVEGFFDSPYFESDTNVKWVLHPHHIGESNI
KTLWEDLNAIHSKYEEDIASLSEDKKEKRIKVYQGDVCQTINTYCEEVGKEAKTPLVQLLRY
LYSRKDDIAVDKIIDGITFLSKKHKVEKQKINPVIQKYPSFNFGNNSKLLGKIISPKDKLKHNL
KCNRNQVDNYIWIEIKVLNTKTMRWEKHHYALSSTRFLEEVYYPATSENPPDALAARFRTKT
NGYEGKPALSAEQIEQIRSAPVGLRKVKKRQMRLEAARQQNLLPRYTWGKDFNINICKRGN
NFEVTLATKVKKKKEKNYKVVLGYDANIVRKNTYAAIEAHANGDGVIDYNDLPVKPIESGF
VTVESQVRDKSYDQLSYNGVKLLYCKPHVESRRSFLEKYRNGTMKDNRGNNIQIDFMKDFE
AIADDETSLYYFNMKYCKLLQSSIRNHSSQAKEYREEIFELLRDGKLSVLKLSSLSNLSFVMF
KVAKSLIGTYFGHLLKKPKNSKSDVKAPPITDEDKQKADPEMFALRLALEEKRLNKVKSKKE
VIANKIVAKALELRDKYGPVLIKGENISDTTKKGKKSSTNSFLMDWLARGVANKVKEMVM
MHQGLEFVEVNPNFTSHQDPFVHKNPENTFRARYSRCTPSELTEKNRKEILSFLSDKPSKRPT
NAYYNEGAMAFLATYGLKKNDVLGVSLEKFKQIMANILHQRSEDQLLFPSRGGMFYLATYK
LDADATSVNWNGKQFWVCNADLVAAYNVGLVDIQKDFKKK.

[0493] In some embodiments, the Cas protein comprises an amino acid sequence that is at least 80%, 85%, 90%, 91%, 92%, 93%, 94%, 95%, 96%, 97%, 98%, 99% or 100% identical to the sequence of SEQ ID NO: 7032 (designated herein as Cas12i2):

MSSAIKSYKSVLRPNERKNQLLKSTIQCLEDGSAFFFKMLQGLFGGITPEIVRFSTEQEKQQQD
IALWCAVNWFRPVSQDSLTHTIASDNLVEKFEEYYGGTASDAIKQYFSASIGESYYWNDCRQ
QYYDLCRELGVEVSDLTHDLEILCREKCLAVATESNQNNSIISVLFGTGEKEDRSVKLRITKKI
LEAISNLKEIPKNVAPIQEIILNVAKATKETFRQVYAGNLGAPSTLEKFIAKDGQKEFDLKKLQ
TDLKKVIRGKSKERDWCCQEELRSYVEQNTIQYDLWAWGEMFNKAHTALKIKSTRNYNFA
KQRLEQFKEIQSLNNLLVVKKLNDFFDSEFFSGEETYTICVHHLGGKDLSKLYKAWEDDPAD
PENAIVVLCDDLKNNFKKEPIRNILRYIFTIRQECSAQDILAAAKYNQQLDRYKSQKANPSVL
GNQGFTWTNAVILPEKAQRNDRPNSLDLRIWLYLKLRHPDGRWKKHHIPFYDTRFFQEIYAA
GNSPVDTCQFRTPRFGYHLPKLTDQTAIRVNKKHVKAAKTEARIRLAIQQGTLPVSNLKITEIS
ATINSKGQVRIPVKFDVGRQKGTLQIGDRFCGYDQNQTASHAYSLWEVVKEGQYHKELGCF
VRFISSGDIVSITENRGNQFDQLSYEGLAYPQYADWRKKASKFVSLWQITKKNKKKEIVTVE
AKEKFDAICKYQPRLYKFNKEYAYLLRDIVRGKSLVELQQIRQEIFRFIEQDCGVTRLGSLSLS
TLETVKAVKGITYSYFSTALNASKNNPISDEQRKEFDPELFALLEKLELIRTRKKKQKVERIAN
SLIQTCLENNIKFIRGEGDLSTTNNATKKKANSRSMDWLARGVFNKIRQLAPMHNITLFGCGS
LYTSHQDPLVHRNPDKAMKCRWAAIPVKDIGDWVLRKLSQNLRAKNIGTGEYYHQGVKEF
LSHYELQDLEEELLKWRSDRKSNIPCWVLQNRLAEKLGNKEAVVYIPVRGGRIYFATHKVAT
GAVSIVFDQKQVWVCNADHVAAANIALTVKGIGEQSSDEENPDGSRIKLQLTS.

[0494] In some embodiments, the Cas protein comprises an amino acid sequence that is at least 80%, 85%, 90%, 91%, 92%, 93%, 94%, 95%, 96%, 97%, 98%, 99% or 100% identical to the sequence of SEQ ID NO: 7033 (designated herein as SpCas9):

[sequence omitted]

### Modified Guide RNAs

[0495] In some embodiments, the guide RNA is chemically modified. A guide RNA comprising one or more modified nucleosides or nucleotides is called a “modified” guide RNA or “chemically modified” guide RNA, to describe the presence of one or more non-naturally and/or naturally occurring components or configurations that are used instead of or in addition to the canonical A, G, C, and U residues. In some embodiments, a modified guide RNA is synthesized with a non-canonical nucleoside or nucleotide, is here called “modified.” Modified nucleosides and nucleotides can include one or more of: (i) alteration, e.g., replacement, of one or both of the non-linking phosphate oxygens and/or of one or more of the linking phosphate oxygens in the phosphodiester backbone linkage (an exemplary backbone modification); (ii) alteration, e.g., replacement, of a constituent of the ribose sugar, e.g., of the 2′ hydroxyl on the ribose sugar (an exemplary sugar modification); (iii) wholesale replacement of the phosphate moiety with “dephospho” linkers (an exemplary backbone modification); (iv) modification or replacement of a naturally occurring nucleobase, including with a non-canonical nucleobase (an exemplary base modification); (v) replacement or modification of the ribose-phosphate backbone (an exemplary backbone modification); (vi) modification of the 3′ end or 5′ end of the oligonucleotide, e.g., removal, modification or replacement of a terminal phosphate group or conjugation of a moiety, cap or linker (such 3′ or 5′ cap modifications may comprise a sugar and/or backbone modification); and (vii) modification or replacement of the sugar (an exemplary sugar modification).

[0496] Chemical modifications such as those listed above can be combined to provide modified guide RNAs comprising nucleosides and nucleotides (collectively “residues”) that can have two, three, four, or more modifications. For example, a modified residue can have a modified sugar and a modified nucleobase, or a modified sugar and a modified phosphodiester. In some embodiments, every base of a guide RNA is modified, e.g., all bases have a modified phosphate group, such as a phosphorothioate group. In certain embodiments, all, or substantially all, of the phosphate groups of an guide RNA molecule are replaced with phosphorothioate groups. In some embodiments, modified guide RNAs comprise at least one modified residue at or near the 5′ end of the RNA. In some embodiments, modified guide RNAs comprise at least one modified residue at or near the 3′ end of the RNA.

[0497] In some embodiments, the guide RNA comprises one, two, three or more modified residues. In some embodiments, at least 5% (e.g., at least 5%, at least 10%, at least 15%, at least 20%, at least 25%, at least 30%, at least 35%, at least 40%, at least 45%, at least 50%, at least 55%, at least 60%, at least 65%, at least 70%, at least 75%, at least 80%, at least 85%, at least 90%, at least 95%, or 100%) of the positions in a modified guide RNA are modified nucleosides or nucleotides.

[0498] Unmodified nucleic acids can be prone to degradation by, e.g., intracellular nucleases or those found in serum. For example, nucleases can hydrolyze nucleic acid phosphodiester bonds. Accordingly, in one aspect the guide RNAs described herein can contain one or more modified nucleosides or nucleotides, e.g., to introduce stability toward intracellular or serum-based nucleases. In some embodiments, the modified guide RNA molecules described herein can exhibit a reduced innate immune response when introduced into a population of cells, both in vivo and ex vivo. The term “innate immune response” includes a cellular response to exogenous nucleic acids, including single stranded nucleic acids, which involves the induction of cytokine expression and release, particularly the interferons, and cell death.

[0499] In some embodiments of a backbone modification, the phosphate group of a modified residue can be modified by replacing one or more of the oxygens with a different substituent. Further, the modified residue, e.g., modified residue present in a modified nucleic acid, can include the wholesale replacement of an unmodified phosphate moiety with a modified phosphate group as described herein. In some embodiments, the backbone modification of the phosphate backbone can include alterations that result in either an uncharged linker or a charged linker with unsymmetrical charge distribution.

[0500] Examples of modified phosphate groups include, phosphorothioate, phosphoroselenates, borano phosphates, borano phosphate esters, hydrogen phosphonates, phosphoroamidates, alkyl or aryl phosphonates and phosphotriesters. The phosphorous atom in an unmodified phosphate group is achiral. However, replacement of one of the non-bridging oxygens with one of the above atoms or groups of atoms can render the phosphorous atom chiral. The stereogenic phosphorous atom can possess either the “R” configuration (herein Rp) or the “S” configuration (herein Sp). The backbone can also be modified by replacement of a bridging oxygen, (i.e., the oxygen that links the phosphate to the nucleoside), with nitrogen (bridged phosphoroamidates), sulfur (bridged phosphorothioates) and carbon (bridged methylenephosphonates). The replacement can occur at either linking oxygen or at both of the linking oxygens.

[0501] The phosphate group can be replaced by non-phosphorus containing connectors in certain backbone modifications. In some embodiments, the charged phosphate group can be replaced by a neutral moiety. Examples of moieties which can replace the phosphate group can include, without limitation, e.g., methyl phosphonate, hydroxylamino, siloxane, carbonate, carboxymethyl, carbamate, amide, thioether, ethylene oxide linker, sulfonate, sulfonamide, thioformacetal, formacetal, oxime, methyleneimino, methylenemethylimino, methylenehydrazo, methylenedimethylhydrazo and methyleneoxymethylimino.

[0502] Scaffolds that can mimic nucleic acids can also be constructed wherein the phosphate linker and ribose sugar are replaced by nuclease resistant nucleoside or nucleotide surrogates. Such modifications may comprise backbone and sugar modifications. In some embodiments, the nucleobases can be tethered by a surrogate backbone. Examples can include, without limitation, the morpholino, cyclobutyl, pyrrolidine and peptide nucleic acid (PNA) nucleoside surrogates.

[0503] The modified nucleosides and modified nucleotides can include one or more modifications to the sugar group, i.e. at sugar modification. For example, the 2′ hydroxyl group (OH) can be modified, e.g. replaced with a number of different “oxy” or “deoxy” substituents. In some embodiments, modifications to the 2′ hydroxyl group can enhance the stability of the nucleic acid since the hydroxyl can no longer be deprotonated to form a 2′-alkoxide ion.

[0504] Examples of 2′ hydroxyl group modifications can include alkoxy or aryloxy (OR, wherein “R” can be, e.g., alkyl, cycloalkyl, aryl, aralkyl, heteroaryl or a sugar); polyethyleneglycols (PEG), O(CH₂CH₂O)ₙCH₂CH₂OR wherein R can be, e.g., H or optionally substituted alkyl, and n can be an integer from 0 to 20 (e.g., from 0 to 4, from 0 to 8, from 0 to 10, from 0 to 16, from 1 to 4, from 1 to 8, from 1 to 10, from 1 to 16, from 1 to 20, from 2 to 4, from 2 to 8, from 2 to 10, from 2 to 16, from 2 to 20, from 4 to 8, from 4 to 10, from 4 to 16, and from 4 to 20). In some embodiments, the 2′ hydroxyl group modification can be 2′-O-Me. In some embodiments, the 2′ hydroxyl group modification can be a 2′-fluoro modification, which replaces the 2′ hydroxyl group with a fluoride. In some embodiments, the 2′ hydroxyl group modification can include “locked” nucleic acids (LNA) in which the 2′ hydroxyl can be connected, e.g., by a C₁₋₆ alkylene or C₁₋₆ heteroalkylene bridge, to the 4′ carbon of the same ribose sugar, where exemplary bridges can include methylene, propylene, ether, or amino bridges; O-amino (wherein amino can be, e.g., NH₂; alkylamino, dialkylamino, heterocyclyl, arylamino, diarylamino, heteroarylamino, or diheteroarylamino, ethylenediamine, or polyamino) and aminoalkoxy, O(CH₂)ₙ-amino, (wherein amino can be, e.g., NH₂; alkylamino, dialkylamino, heterocyclyl, arylamino, diarylamino, heteroarylamino, or diheteroarylamino, ethylenediamine, or polyamino) In some embodiments, the 2′ hydroxyl group modification can include “unlocked” nucleic acids (UNA) in which the ribose ring lacks the C2′-C3′ bond. In some embodiments, the 2′ hydroxyl group modification can include the methoxyethyl group (MOE), (OCH₂CH₂OCH₃, e.g., a PEG derivative).

[0505] “Deoxy” 2′ modifications can include hydrogen (i.e. deoxyribose sugars, e.g., at the overhang portions of partially dsRNA); halo (e.g., bromo, chloro, fluoro, or iodo); amino (wherein amino can be, e.g., NH₂; alkylamino, dialkylamino, heterocyclyl, arylamino, diarylamino, heteroarylamino, diheteroarylamino, or amino acid); NH(CH₂CH₂NH)ₙCH₂CH₂-amino (wherein amino can be, e.g., as described herein), —NHC(O)R (wherein R can be, e.g., alkyl, cycloalkyl, aryl, aralkyl, heteroaryl or sugar), cyano; mercapto; alkyl-thio-alkyl; thioalkoxy; and alkyl, cycloalkyl, aryl, alkenyl and alkynyl, which may be optionally substituted with e.g., an amino as described herein.

[0506] The sugar modification can comprise a sugar group which may also contain one or more carbons that possess the opposite stereochemical configuration than that of the corresponding carbon in ribose. Thus, a modified nucleic acid can include nucleotides containing e.g., arabinose, as the sugar. The modified nucleic acids can also include abasic sugars. These abasic sugars can also be further modified at one or more of the constituent sugar atoms. The modified nucleic acids can also include one or more sugars that are in the L form, e.g. L-nucleosides.

[0507] The modified nucleosides and modified nucleotides described herein, which can be incorporated into a modified nucleic acid, can include a modified base, also called a nucleobase. Examples of nucleobases include, but are not limited to, adenine (A), guanine (G), cytosine (C), and uracil (U). These nucleobases can be modified or wholly replaced to provide modified residues that can be incorporated into modified nucleic acids. The nucleobase of the nucleotide can be independently selected from a purine, a pyrimidine, a purine analog, or pyrimidine analog. In some embodiments, the nucleobase can include, for example, naturally-occurring and synthetic derivatives of a base.

[0508] In embodiments employing a dual guide RNA, each of the crRNA and the tracr RNA can contain modifications. Such modifications may be at one or both ends of the crRNA and/or tracr RNA. In embodiments comprising sgRNA, one or more residues at one or both ends of the sgRNA may be chemically modified, and/or internal nucleosides may be modified, and/or the entire sgRNA may be chemically modified. Certain embodiments comprise a 5′ end modification. Certain embodiments comprise a 3′ end modification.

[0509] Modifications of 2′-O-methyl are encompassed.

[0510] Another chemical modification that has been shown to influence nucleotide sugar rings is halogen substitution. For example, 2′-fluoro (2′-F) substitution on nucleotide sugar rings can increase oligonucleotide binding affinity and nuclease stability. Modifications of 2′-fluoro (2′-F) are encompassed.

[0511] Phosphorothioate (PS) linkage or bond refers to a bond where a sulfur is substituted for one nonbridging phosphate oxygen in a phosphodiester linkage, for example in the bonds between nucleotides bases. When phosphorothioates are used to generate oligonucleotides, the modified oligonucleotides may also be referred to as S-oligos.

[0512] Abasic nucleotides refer to those which lack nitrogenous bases.

[0513] Inverted bases refer to those with linkages that are inverted from the normal 5′ to 3′ linkage (i.e., either a 5′ to 5′ linkage or a 3′ to 3′ linkage).

[0514] An abasic nucleotide can be attached with an inverted linkage. For example, an abasic nucleotide may be attached to the terminal 5′ nucleotide via a 5′ to 5′ linkage, or an abasic nucleotide may be attached to the terminal 3′ nucleotide via a 3′ to 3′ linkage. An inverted abasic nucleotide at either the terminal 5′ or 3′ nucleotide may also be called an inverted abasic end cap.

[0515] In some embodiments, one or more of the first three, four, or five nucleotides at the 5′ terminus, and one or more of the last three, four, or five nucleotides at the 3′ terminus are modified. In some embodiments, the modification is a 2′-O-Me, 2′-F, inverted abasic nucleotide, PS bond, or other nucleotide modification well known in the art to increase stability and/or performance.

[0516] In some embodiments, the first four nucleotides at the 5′ terminus, and the last four nucleotides at the 3′ terminus are linked with phosphorothioate (PS) bonds.

[0517] In some embodiments, the first three nucleotides at the 5′ terminus, and the last three nucleotides at the 3′ terminus comprise a 2′-O-methyl (2′-O-Me) modified nucleotide. In some embodiments, the first three nucleotides at the 5′ terminus, and the last three nucleotides at the 3′ terminus comprise a 2′-fluoro (2′-F) modified nucleotide.

### Ribonucleoprotein Complex

[0518] In some embodiments, a composition is encompassed comprising: a) one or more guide RNAs comprising one or more guide sequences from Table 1A, Table 1B, or Table 5 and b) saCas9 (when combined with a gRNA comprising any one of or combination of SEQ ID Nos: 1-35, 1000-1078, and 3000-3069) or sluCas9 (when combined with a gRNA comprising any one of or combination of SEQ ID Nos: 100-225, 2000-2116, and 4000-4251), or any of the mutant Cas9 proteins disclosed herein. In some embodiments, the guide RNA together with a Cas9 is called a ribonucleoprotein complex (RNP).

[0519] In some embodiments, the disclosure provides for an RNP complex, wherein the guide RNA (e.g., any of the guide RNAs disclosed herein) binds to or is capable of binding to a target sequence in the dystrophin gene (e.g., a splice acceptor site or a splice donor site for exons 45, 51, or 53, including e.g., the Exon 51 intron-exon junction having the sequence ccagagtaacagtctgagtaggagctaaaatattagggtattgcaa (SEQ ID NO: 721), or a target sequence bound by any of the sequences disclosed in Table 1A, Table 1B, and 5), wherein the dystrophin gene comprises a PAM recognition sequence position upstream of the target sequence, and wherein the RNP cuts at a position that is 3 nucleotides upstream (−3) of the PAM in the dystrophin gene. In some embodiments, the RNP also cuts at a position that is 2 nucleotides upstream (−2), 4 nucleotides upstream (−4), 5 nucleotides upstream (−5), or 6 nucleotides upstream (−6) of the PAM in the dystrophin gene. In some embodiments, the RNP cuts at a position that is 3 nucleotides upstream (−3) and 4 nucleotides upstream (−4) of the PAM in the dystrophin gene.

[0520] In some embodiments, chimeric Cas9 (SaCas9 or SluCas9) nucleases are used, where one domain or region of the protein is replaced by a portion of a different protein. In some embodiments, a Cas9 nuclease domain may be replaced with a domain from a different nuclease such as Fok1. In some embodiments, a Cas9 nuclease may be a modified nuclease.

[0521] In some embodiments, the Cas9 is modified to contain only one functional nuclease domain. For example, the agent protein may be modified such that one of the nuclease domains is mutated or fully or partially deleted to reduce its nucleic acid cleavage activity.

[0522] In some embodiments, a conserved amino acid within a Cas9 protein nuclease domain is substituted to reduce or alter nuclease activity. In some embodiments, a Cas9 nuclease may comprise an amino acid substitution in the RuvC or RuvC-like nuclease domain. Exemplary amino acid substitutions in the RuvC or RuvC-like nuclease domain include D10A (based on the S. pyogenes Cas9 protein). See, e.g., Zetsche et al. (2015) Cell October 22:163(3): 759-771. In some embodiments, the Cas9 nuclease may comprise an amino acid substitution in the HNH or HNH-like nuclease domain. Exemplary amino acid substitutions in the HNH or HNH-like nuclease domain include E762A, H840A, N863A, H983A, and D986A (based on the S. pyogenes Cas9 protein). See, e.g., Zetsche et al. (2015). Further exemplary amino acid substitutions include D917A, E1006A, and D1255A (based on the Francisella novicida U112 Cpf1 (FnCpf1) sequence (UniProtKB—A0Q7Q2 (CPF1_FRATN)). Further exemplary amino acid substitutions include D10A and N580A (based on the S. aureus Cas9 protein). See, e.g., Friedland et al., 2015, Genome Biol., 16:257.

[0523] In some embodiments, the Cas9 lacks cleavase activity. In some embodiments, the Cas9 comprises a dCas DNA-binding polypeptide. A dCas polypeptide has DNA-binding activity while essentially lacking catalytic (cleavase/nickase) activity. In some embodiments, the dCas polypeptide is a dCas9 polypeptide. In some embodiments, the Cas9 lacking cleavase activity or the dCas DNA-binding polypeptide is a version of a Cas nuclease (e.g., a Cas9 nuclease discussed above) in which its endonucleolytic active sites are inactivated, e.g., by one or more alterations (e.g., point mutations) in its catalytic domains. See, e.g., US 2014/0186958 A1; US 2015/0166980 A1.

[0524] In some embodiments, the Cas9 comprises one or more heterologous functional domains (e.g., is or comprises a fusion polypeptide).

[0525] In some embodiments, the heterologous functional domain may facilitate transport of the Cas9 into the nucleus of a cell. For example, the heterologous functional domain may be a nuclear localization signal (NLS). In some embodiments, the Cas9 may be fused with 1-10 NLS(s). In some embodiments, the Cas9 may be fused with 1-5 NLS(s). In some embodiments, the Cas9 may be fused with 1-3 NLS(s). In some embodiments, the Cas9 may be fused with one NLS. Where one NLS is used, the NLS may be attached at the N-terminus or the C-terminus of the Cas9 sequence, and may be directly fused/attached or fused/attached via a linker. It may also be inserted within the Cas9 sequence. In other embodiments, the Cas9 may be fused with more than one NLS. In some embodiments, the Cas9 may be fused with 2, 3, 4, or 5 NLSs. In some embodiments, the Cas9 may be fused with two NLSs. In certain circumstances, the two NLSs may be the same (e.g., two SV40 NLSs) or different. In some embodiments, the Cas9 protein is fused with one or more SV40 NLSs. In some embodiments, the SV40 NLS comprises the amino acid sequence of SEQ ID NO: 713 (PKKKRKV). In some embodiments, the Cas9 protein (e.g., the SaCas9 or SluCas9 protein) is fused to one or more nucleoplasmin NLSs. In some embodiments, the Cas protein is fused to one or more c-myc NLSs. In some embodiments, the Cas protein is fused to one or more E1A NLSs. In some embodiments, the Cas protein is fused to one or more BP (bipartite) NLSs. In some embodiments, the nucleoplasmin NLS comprises the amino acid sequence of SEQ ID NO: 714 (KRPAATKKAGQAKKKK). In some embodiments, the Cas9 protein is fused with a c-Myc NLS. In some embodiments, the c-Myc NLS is encoded by the nucleic acid sequence of SEQ ID NO: 722 (CCGGCAGCTAAGAAAAAGAAACTGGAT). In some embodiments, the Cas9 is fused to two SV40 NLS sequences linked at the carboxy terminus. In some embodiments, the Cas9 may be fused with two NLSs, one linked at the N-terminus and one at the C-terminus. In some embodiments, the Cas9 may be fused with 3 NLSs. In some embodiments, the Cas9 may be fused with 3 NLSs, two linked at the N-terminus and one linked at the C-terminus. In some embodiments, the Cas9 may be fused with 3 NLSs, one linked at the N-terminus and two linked at the C-terminus. In some embodiments, the Cas9 may be fused with no NLS. In some embodiments, the Cas9 may be fused with one NLS. In some embodiments, the Cas9 may be fused with an NLS on the C-terminus and does not comprise an NLS fused on the N-terminus. In some embodiments, the Cas9 may be fused with an NLS on the N-terminus and does not comprise an NLS fused on the C-terminus. In some embodiments, the Cas9 protein is fused to an SV40 NLS and to a nucleoplasmin NLS. In some embodiments, the Cas9 protein is fused to an SV40 NLS and to a c-Myc NLS. In some embodiments, the SV40 NLS is fused to the C-terminus of the Cas9, while the nucleoplasmin NLS is fused to the N-terminus of the Cas9 protein. In some embodiments, the SV40 NLS is fused to the C-terminus of the Cas9, while the c-Myc NLS is fused to the N-terminus of the Cas9 protein. In some embodiments, the SV40 NLS is fused to the N-terminus of the Cas9, while the nucleoplasmin NLS is fused to the C-terminus of the Cas9 protein. In some embodiments, the SV40 NLS is fused to the N-terminus of the Cas9, while the c-Myc NLS is fused to the C-terminus of the Cas9 protein. In some embodiments, the SV40 NLS is fused to the Cas9 protein by means of a linker. In some embodiments, the SV40 NLS and linker is encoded by the nucleic acid sequence of SEQ ID NO: 723 (ATGATGGCCCCAAAGAAGAAGCGGAAGGTCGGTATCCACGGAGTCCCAGCAGCC). In some embodiments, the nucleoplasmin NLS is fused to the Cas9 protein by means of a linker. In some embodiments, the c-Myc NLS is fused to the Cas9 protein by means of a linker. In some embodiments, an additional domain may be: a) fused to the N- or C-terminus of the Cas protein (e.g., a Cas9 protein), b) fused to the N-terminus of an NLS fused to the N-terminus of a Cas protein, or c) fused to the C-terminus of an NLS fused to the C-terminus of a Cas protein. In some embodiments, an NLS is fused to the N- and/or C-terminus of the Cas protein by means of a linker. In some embodiments, an NLS is fused to the N-terminus of an N-terminally-fused NLS on a Cas protein by means of a linker, and/or an NLS is fused to the C-terminus of a C-terminally fused NLS on a Cas protein by means of a linker. In some embodiments, the linker is GSVD (SEQ ID NO: 550) or GSGS (SEQ ID NO: 551). In some embodiments, the Cas protein comprises a c-Myc NLS fused to the N-terminus of the Cas protein (or to an N-terminally-fused NLS on the Cas protein), optionally by means of a linker. In some embodiments, the Cas protein comprises an SV40 NLS fused to the C-terminus of the Cas protein (or to a C-terminally-fused NLS on the Cas protein), optionally by means of a linker. In some embodiments, the Cas protein comprises a nucleoplasmin NLS fused to the C-terminus of the Cas protein (or to a C-terminally-fused NLS on the Cas protein), optionally by means of a linker. In some embodiments, the Cas protein comprises: a) a c-Myc NLS fused to the N-terminus of the Cas protein, optionally by means of a linker, b) an SV40 NLS fused to the C-terminus of the Cas protein, optionally by means of a linker, and c) a nucleoplasmin NLS fused to the C-terminus of the SV40 NLS, optionally by means of a linker. In some embodiments, the Cas protein comprises: a) a c-Myc NLS fused to the N-terminus of the Cas protein, optionally by means of a linker, b) a nucleoplasmin NLS fused to the C-terminus of the Cas protein, optionally by means of a linker, and c) an SV40 NLS fused to the C-terminus of the nucleoplasmin NLS, optionally by means of a linker.

[0526] In some embodiments, the heterologous functional domain may be capable of modifying the intracellular half-life of the Cas9. In some embodiments, the half-life of the Cas9 may be increased. In some embodiments, the half-life of the Cas9 may be reduced. In some embodiments, the heterologous functional domain may be capable of increasing the stability of the Cas9. In some embodiments, the heterologous functional domain may be capable of reducing the stability of the Cas9. In some embodiments, the heterologous functional domain may act as a signal peptide for protein degradation. In some embodiments, the protein degradation may be mediated by proteolytic enzymes, such as, for example, proteasomes, lysosomal proteases, or calpain proteases. In some embodiments, the heterologous functional domain may comprise a PEST sequence. In some embodiments, the Cas9 may be modified by addition of ubiquitin or a polyubiquitin chain. In some embodiments, the ubiquitin may be a ubiquitin-like protein (UBL). Non-limiting examples of ubiquitin-like proteins include small ubiquitin-like modifier (SUMO), ubiquitin cross-reactive protein (UCRP, also known as interferon-stimulated gene-15 (ISG15)), ubiquitin-related modifier-1 (URM1), neuronal-precursor-cell-expressed developmentally downregulated protein-8 (NEDD8, also called Rubl in S. cerevisiae), human leukocyte antigen F-associated (FAT10), autophagy-8 (ATG8) and -12 (ATG12), Fau ubiquitin-like protein (FUB1), membrane-anchored UBL (MUB), ubiquitin fold-modifier-1 (UFM1), and ubiquitin-like protein-5 (UBLS).

[0527] In some embodiments, the heterologous functional domain may be a marker domain. Non-limiting examples of marker domains include fluorescent proteins, purification tags, epitope tags, and reporter gene sequences. In some embodiments, the marker domain may be a fluorescent protein. Non-limiting examples of suitable fluorescent proteins include green fluorescent proteins (e.g., GFP, GFP-2, tagGFP, turboGFP, sfGFP, EGFP, Emerald, Azami Green, Monomeric Azami Green, CopGFP, AceGFP, ZsGreenl), yellow fluorescent proteins (e.g., YFP, EYFP, Citrine, Venus, YPet, PhiYFP, ZsYellow1), blue fluorescent proteins (e.g., EBFP, EBFP2, Azurite, mKalamal, GFPuv, Sapphire, T-sapphire,), cyan fluorescent proteins (e.g., ECFP, Cerulean, CyPet, AmCyan1, Midoriishi-Cyan), red fluorescent proteins (e.g., mKate, mKate2, mPlum, DsRed monomer, mCherry, mRFP1, DsRed-Express, DsRed2, DsRed-Monomer, HcRed-Tandem, HcRedl, AsRed2, eqFP611, mRasberry, mStrawberry, Jred), and orange fluorescent proteins (mOrange, mKO, Kusabira-Orange, Monomeric Kusabira-Orange, mTangerine, tdTomato) or any other suitable fluorescent protein. In other embodiments, the marker domain may be a purification tag and/or an epitope tag. Non-limiting exemplary tags include glutathione-S-transferase (GST), chitin binding protein (CBP), maltose binding protein (MBP), thioredoxin (TRX), poly(NANP), tandem affinity purification (TAP) tag, myc, AcV5, AU1, AUS, E, ECS, E2, FLAG, HA, nus, Softag 1, Softag 3, Strep, SBP, Glu-Glu, HSV, KT3, S, 51, T7, V5, VSV-G, 6×His, 8×His, biotin carboxyl carrier protein (BCCP), poly-His, and calmodulin. Non-limiting exemplary reporter genes include glutathione-S-transferase (GST), horseradish peroxidase (HRP), chloramphenicol acetyltransferase (CAT), beta-galactosidase, beta-glucuronidase, luciferase, or fluorescent proteins.

[0528] In additional embodiments, the heterologous functional domain may target the Cas9 to a specific organelle, cell type, tissue, or organ. In some embodiments, the heterologous functional domain may target the Cas9 to muscle.

[0529] In further embodiments, the heterologous functional domain may be an effector domain. When the Cas9 is directed to its target sequence, e.g., when a Cas9 is directed to a target sequence by a guide RNA, the effector domain may modify or affect the target sequence. In some embodiments, the effector domain may be chosen from a nucleic acid binding domain or a nuclease domain (e.g., a non-Cas nuclease domain). In some embodiments, the heterologous functional domain is a nuclease, such as a FokI nuclease. See, e.g., U.S. Pat. No. 9,023,649.

[0530] In some embodiments, any of the compositions disclosed herein comprising any of the guides and/or endonucleases disclosed herein is sterile and/or substantially pyrogen-free. In particular embodiments, any of the compositions disclosed herein comprise a pharmaceutically acceptable carrier. The phrase “pharmaceutically or pharmacologically acceptable” refers to molecular entities and compositions that do not produce an adverse, allergic, or other untoward reaction when administered to an animal or human. As used herein “pharmaceutically acceptable carrier” includes any and all solvents (e.g., water), dispersion media, coatings, antibacterial and antifungal agents, isotonic and absorption delaying agents, and the like that are physiologically compatible, including pharmaceutically acceptable cell culture media. Pharmaceutically acceptable carriers include sterile aqueous solutions or dispersions and sterile powders for the extemporaneous preparation of sterile injectable solutions or dispersion. In some embodiments, the composition comprises a preservative to prevent the growth of microorganisms.

### Determination of Efficacy of Guide RNAs

[0531] In some embodiments, the efficacy of a guide RNA is determined when delivered or expressed together with other components forming an RNP. In some embodiments, the guide RNA is expressed together with a SaCas9 or SluCas9. In some embodiments, the guide RNA is delivered to or expressed in a cell line that already stably expresses an SaCas9 or SluCas9. In some embodiments the guide RNA is delivered to a cell as part of an RNP. In some embodiments, the guide RNA is delivered to a cell along with a nucleic acid (e.g., mRNA) encoding SaCas9 or SluCas9.

[0532] In some embodiments, the efficacy of particular guide RNAs is determined based on in vitro models. In some embodiments, the in vitro model is a cell line.

[0533] In some embodiments, the efficacy of particular guide RNAs is determined across multiple in vitro cell models for a guide RNA selection process. In some embodiments, a cell line comparison of data with selected guide RNAs is performed. In some embodiments, cross screening in multiple cell models is performed.

[0534] In some embodiments, the efficacy of particular guide RNAs is determined based on in vivo models. In some embodiments, the in vivo model is a rodent model. In some embodiments, the rodent model is a mouse which expresses a mutated dystrophin gene, e.g., a mdx mouse. In some embodiments, the in vivo model is a non-human primate, for example cynomolgus monkey.

### III. Methods of Gene Editing and Treating DMD

[0535] This disclosure provides methods for gene editing and treating Duchenne Muscular Dystrophy (DMD). In some embodiments, any of the compositions described herein may be administered to a subject in need thereof for use in making a double or single strand break in any one or more of exons 43, 44, 45, 50, 51, or 53 of the dystrophin (DMD) gene. In some embodiments, pairs of guide RNAs described herein, in any of the vector configurations described herein, may be administered to a subject in need thereof to excise a portion of a DMD, thereby treating DMD. In some embodiments, any of the compositions described herein may be administered to a subject in need thereof for use in treating DMD. In some embodiments, a nucleic acid molecule comprising a first nucleic acid encoding one or more guide RNAs of Table 1A, Table 1B, or Table 5 and a second nucleic acid encoding either SaCas9 or SluCas9 (depending on the guide) is administered to a subject to treat DMD. In some embodiments, a single nucleic acid molecule (which may be a vector, including an AAV vector) comprising a first nucleic acid encoding one or more guide RNAs of Table 1A, Table 1B, or Table 5 and a second nucleic acid encoding either SaCas9 or SluCas9 (depending on the guide) is administered to a subject to treat DMD.

[0536] In some embodiments, any of the compositions described herein is administered to a subject in need thereof to treat Duchenne Muscular Dystrophy (DMD).

[0537] In some embodiments, any of the compositions described herein is administered to a subject in need thereof to induce a double strand break in any one or more of exons 43, 44, 45, 50, 51, or 53 of the dystrophin gene.

[0538] In some embodiments, a method of treating Duchenne Muscular Dystrophy (DMD) is provided, the method comprising delivering to a cell any one of the compositions described herein, wherein the cell comprises a mutation in the dystrophin gene that is known to be associated with DMD.

[0539] In particular, in some embodiments, a method of treating Duchenne Muscular Dystrophy (DMD) is provided, the method comprising delivering to a cell: 1) a nucleic acid molecule comprising: a nucleic acid encoding one or more spacer sequences selected from SEQ ID NOs: 1-35, 1000-1078, and 3000-3069; a nucleic acid encoding one or more spacer sequences comprising at least 17, 18, 19, or 20 contiguous nucleotides of a spacer sequence selected from SEQ ID NOs: 1-35, 1000-1078, and 3000-3069; or a nucleic acid encoding one or more spacer sequences that is at least 90% identical to any one of SEQ ID NOs: 1-35, 1000-1078, 3000-3069; and 2) a Staphylococcus aureus Cas9 (SaCas9) or a nucleic acid encoding (SaCas9).

[0540] In some embodiments, a method of treating Duchenne Muscular Dystrophy (DMD) is provided, the method comprising delivering to a cell: 1) a nucleic acid molecule comprising: a nucleic acid encoding one or more spacer sequences selected from SEQ ID NOs: 1-35, 1000-1078, and 3000-3069; a nucleic acid encoding one or more spacer sequences comprising at least 17, 18, 19, or 20 contiguous nucleotides of a spacer sequence selected from SEQ ID NOs: 1-35, 1000-1078, and 3000-3069; or a nucleic acid encoding one or more spacer sequences that is at least 90% identical to any one of SEQ ID NOs: 1-35, 1000-1078, 3000-3069; and 2) a Staphylococcus aureus Cas9 (SaCas9) or a nucleic acid encoding (SaCas9); wherein the cell comprises a mutation in the dystrophin gene that is known to be associated with DMD.

[0541] In some embodiments, a method of treating Duchenne Muscular Dystrophy (DMD) is provided, the method comprising delivering to a cell: a single nucleic acid molecule comprising: 1) a nucleic acid encoding one or more spacer sequences selected from SEQ ID NOs: 1-35, 1000-1078, and 3000-3069; a nucleic acid encoding one or more spacer sequences comprising at least 17, 18, 19, or 20 contiguous nucleotides of a spacer sequence selected from SEQ ID NOs: 1-35, 1000-1078, and 3000-3069; or a nucleic acid encoding one or more spacer sequences that is at least 90% identical to any one of SEQ ID NOs: 1-35, 1000-1078, and 3000-3069; and 2) a nucleic acid encoding SaCas9.

[0542] In some embodiments, a method of treating Duchenne Muscular Dystrophy (DMD) is provided, the method comprising delivering to a cell a single nucleic acid molecule comprising: 1) a nucleic acid encoding one or more spacer sequences selected from SEQ ID NOs: 10, 12, 15, 16, 20, 27, 28, 32, 33, 35, 1001, 1003, 1005, 1010, 1012, 1013, 1016, 1017, and 1018; a nucleic acid encoding one or more spacer sequence comprising at least 17, 18, 19, or 20 contiguous nucleotides of a spacer sequence selected from SEQ ID NOs: 10, 12, 15, 16, 20, 27, 28, 32, 33, 35, 1001, 1003, 1005, 1010, 1012, 1013, 1016, 1017, and 1018; or a nucleic acid encoding one or more spacer sequence that is at least 90% identical to any one of SEQ ID NOs: 10, 12, 15, 16, 20, 27, 28, 32, 33, 35, 1001, 1003, 1005, 1010, 1012, 1013, 1016, 1017, and 1018; and 2) a nucleic acid encoding a Staphylococcus aureus Cas9 (SaCas9). In some embodiments, a method of treating Duchenne Muscular Dystrophy (DMD) is provided, the method comprising delivering to a cell: a single nucleic acid molecule comprising: 1) a nucleic acid encoding one or more spacer sequences selected from SEQ ID NOs: 10, 12, 15, 16, 20, 27, 28, 32, 33, 35, 1001, 1003, 1005, 1010, 1012, 1013, 1016, 1017, and 1018; a nucleic acid encoding one or more spacer sequences comprising at least 17, 18, 19, or 20 contiguous nucleotides of one or more spacer sequences selected from SEQ ID NOs: 10, 12, 15, 16, 20, 27, 28, 32, 33, 35, 1001, 1003, 1005, 1010, 1012, 1013, 1016, 1017, and 1018; or a nucleic acid encoding one or more spacer sequences that is at least 90% identical to any one of SEQ ID NOs: 10, 12, 15, 16, 20, 27, 28, 32, 33, 35, 1001, 1003, 1005, 1010, 1012, 1013, 1016, 1017, and 1018; and 2) a nucleic acid encoding SaCas9. In some embodiments, the spacer sequence is SEQ ID NO: 10. In some embodiments, the spacer sequence is SEQ ID NO: 12. In some embodiments, the spacer sequence is SEQ ID NO: 15. In some embodiments, the spacer sequence is SEQ ID NO: 16. In some embodiments, the spacer sequence is SEQ ID NO: 20. In some embodiments, the spacer sequence is SEQ ID NO: 27. In some embodiments, the spacer sequence is SEQ ID NO: 28. In some embodiments, the spacer sequence is SEQ ID NO: 32. In some embodiments, the spacer sequence is SEQ ID NO: 33. In some embodiments, the spacer sequence is SEQ ID NO: 35. In some embodiments, the spacer sequence is SEQ ID NO: 1001. In some embodiments, the spacer sequence is SEQ ID NO: 1003. In some embodiments, the spacer sequence is SEQ ID NO: 1005. In some embodiments, the spacer sequence is SEQ ID NO: 1010. In some embodiments, the spacer sequence is SEQ ID NO: 1012. In some embodiments, the spacer sequence is SEQ ID NO: 1013. In some embodiments, the spacer sequence is SEQ ID NO: 1016. In some embodiments, the spacer sequence is SEQ ID NO: 1017. In some embodiments, the spacer sequence is SEQ ID NO: 1018.

[0543] In some embodiments, a method of treating Duchenne Muscular Dystrophy (DMD) is provided, the method comprising delivering to a cell a single nucleic acid molecule comprising: 1) a nucleic acid encoding one or more spacer sequences selected from SEQ ID NOs: 3022, 3023, 3028, 3029, 3030, 3031, 3038, 3039, 3052, 3053, 3054, 3055, 3062, 3063, 3064, 3065, 3068, and 3069; a nucleic acid encoding one or more spacer sequence comprising at least 17, 18, 19, or 20 contiguous nucleotides of a spacer sequence selected from SEQ ID NOs: 3022, 3023, 3028, 3029, 3030, 3031, 3038, 3039, 3052, 3053, 3054, 3055, 3062, 3063, 3064, 3065, 3068, and 3069; or a nucleic acid encoding one or more spacer sequence that is at least 90% identical to any one of SEQ ID NOs: 3022, 3023, 3028, 3029, 3030, 3031, 3038, 3039, 3052, 3053, 3054, 3055, 3062, 3063, 3064, 3065, 3068, and 3069; and 2) a nucleic acid encoding a Staphylococcus aureus Cas9 (SaCas9). In some embodiments, a method of treating Duchenne Muscular Dystrophy (DMD) is provided, the method comprising delivering to a cell: a single nucleic acid molecule comprising: 1) a nucleic acid encoding one or more spacer sequences selected from SEQ ID NOs: 3022, 3023, 3028, 3029, 3030, 3031, 3038, 3039, 3052, 3053, 3054, 3055, 3062, 3063, 3064, 3065, 3068, and 3069; a nucleic acid encoding one or more spacer sequences comprising at least 17, 18, 19, or 20 contiguous nucleotides of one or more spacer sequences selected from SEQ ID NOs: 3022, 3023, 3028, 3029, 3030, 3031, 3038, 3039, 3052, 3053, 3054, 3055, 3062, 3063, 3064, 3065, 3068, and 3069; or a nucleic acid encoding one or more spacer sequences that is at least 90% identical to any one of SEQ ID NOs: 3022, 3023, 3028, 3029, 3030, 3031, 3038, 3039, 3052, 3053, 3054, 3055, 3062, 3063, 3064, 3065, 3068, and 3069; and 2) a nucleic acid encoding SaCas9. In some embodiments, the spacer sequence is SEQ ID NO: 3022. In some embodiments, the spacer sequence is SEQ ID NO: 3023. In some embodiments, the spacer sequence is SEQ ID NO: 3028. In some embodiments, the spacer sequence is SEQ ID NO: 3029. In some embodiments, the spacer sequence is SEQ ID NO: 3030. In some embodiments, the spacer sequence is SEQ ID NO: 3031. In some embodiments, the spacer sequence is SEQ ID NO: 3038. In some embodiments, the spacer sequence is SEQ ID NO: 3039. In some embodiments, the spacer sequence is SEQ ID NO: 3052. In some embodiments, the spacer sequence is SEQ ID NO: 3053. In some embodiments, the spacer sequence is SEQ ID NO: 3054. In some embodiments, the spacer sequence is SEQ ID NO: 3055. In some embodiments, the spacer sequence is SEQ ID NO: 3062. In some embodiments, the spacer sequence is SEQ ID NO: 3063. In some embodiments, the spacer sequence is SEQ ID NO: 3064. In some embodiments, the spacer sequence is SEQ ID NO: 3065. In some embodiments, the spacer sequence is SEQ ID NO: 3068. In some embodiments, the spacer sequence is SEQ ID NO: 3069.

[0544] In particular, in some embodiments, a method of treating Duchenne Muscular Dystrophy (DMD) is provided, the method comprising delivering to a cell: 1) a nucleic acid molecule comprising: a nucleic acid encoding one or more spacer sequences selected from SEQ ID NOs: 100-225, 2000-2116, and 4000-4251; a nucleic acid encoding one or more spacer sequences comprising at least 17, 18, 19, or 20 contiguous nucleotides of a spacer sequence selected from SEQ ID NOs: 100-225, 2000-2116, and 4000-4251; or a nucleic acid encoding one or more spacer sequences that is at least 90% identical to any one of SEQ ID NOs: 100-225, 2000-2116, and 4000-4251; and 2) a Staphylococcus lugdunensis (SluCas9) or a nucleic acid molecule encoding SluCas9.

[0545] In particular, in some embodiments, a method of treating Duchenne Muscular Dystrophy (DMD) is provided, the method comprising delivering to a cell: 1) a nucleic acid molecule comprising: a nucleic acid encoding one or more spacer sequences selected from SEQ ID NOs: 100-225, 2000-2116, and 4000-4251; a nucleic acid encoding one or more spacer sequences comprising at least 17, 18, 19, or 20 contiguous nucleotides of a spacer sequence selected from SEQ ID NOs: 100-225, 2000-2116, and 4000-4251; or a nucleic acid encoding one or more spacer sequences that is at least 90% identical to any one of SEQ ID NOs: 100-225, 2000-2116, and 4000-4251; and 2) a Staphylococcus lugdunensis (SluCas9) or a nucleic acid molecule encoding SluCas9; wherein the cell comprises a mutation in the dystrophin gene that is known to be associated with DMD.

[0546] In some embodiments, a method of treating Duchenne Muscular Dystrophy (DMD) is provided, the method comprising delivering to a cell: a single nucleic acid molecule comprising: 1) a nucleic acid encoding one or more spacer sequences selected from SEQ ID NOs: 100-225, 2000-2116, and 4000-4251; a nucleic acid encoding one or more spacer sequences comprising at least 17, 18, 19, or 20 contiguous nucleotides of a spacer sequence selected from SEQ ID NOs: 100-225, 2000-2116, and 4000-4251; or a nucleic acid encoding one or more spacer sequences that is at least 90% identical to any one of SEQ ID NOs: 100-225, 2000-2116, and 4000-4251; and 2) a nucleic acid encoding Staphylococcus lugdunensis (SluCas9).

[0547] In some embodiments, a method of treating Duchenne Muscular Dystrophy (DMD) is provided, the method comprising delivering to a cell: 1) a nucleic acid molecule comprising: a nucleic acid encoding one or more spacer sequences selected from SEQ ID NOs: 131, 134, 135, 136, 139, 140, 141, 144, 145, 146, 148, 149, 150, 151, 179, 184, 201, 210, 223, 224, 225; a nucleic acid encoding a spacer sequence comprising at least 17, 18, 19, or 20 contiguous nucleotides of one or more spacer sequences selected from SEQ ID NOs: 131, 134, 135, 136, 139, 140, 141, 144, 145, 146, 148, 149, 150, 151, 179, 184, 201, 210, 223, 224, 225; or a nucleic acid encoding one or more spacer sequences that is at least 90% identical to any one of SEQ ID NOs: 131, 134, 135, 136, 139, 140, 141, 144, 145, 146, 148, 149, 150, 151, 179, 184, 201, 210, 223, 224, 225; and 2) a Staphylococcus lugdunensis (SluCas9) or a nucleic acid molecule encoding SluCas9. In some embodiments, a method of treating Duchenne Muscular Dystrophy (DMD) is provided, the method comprising delivering to a cell: a single nucleic acid molecule comprising: 1) a nucleic acid encoding one or more spacer sequences selected from SEQ ID NOs: 131, 134, 135, 136, 139, 140, 141, 144, 145, 146, 148, 149, 150, 151, 179, 184, 201, 210, 223, 224, 225; a nucleic acid encoding one or more spacer sequences comprising at least 17, 18, 19, or 20 contiguous nucleotides of one or more spacer sequences selected from SEQ ID NOs: 131, 134, 135, 136, 139, 140, 141, 144, 145, 146, 148, 149, 150, 151, 179, 184, 201, 210, 223, 224, 225; or a nucleic acid encoding one or more spacer sequences that is at least 90% identical to any one of SEQ ID NOs: 131, 134, 135, 136, 139, 144, 148, 149, 150, 151, 179, 184, 201, 210, 223, 224, 225; and 2) a nucleic acid encoding Staphylococcus lugdunensis (SluCas9). In some embodiments, the spacer sequence is SEQ ID NO: 131. In some embodiments, the spacer sequence is SEQ ID NO: 134. In some embodiments, the spacer sequence is SEQ ID NO: 135. In some embodiments, the spacer sequence is SEQ ID NO: 136. In some embodiments, the spacer sequence is SEQ ID NO: 139. In some embodiments, the spacer sequence is SEQ ID NO: 140. In some embodiments, the spacer sequence is SEQ ID NO: 141. In some embodiments, the spacer sequence is SEQ ID NO: 144. In some embodiments, the spacer sequence is SEQ ID NO: 145. In some embodiments, the spacer sequence is SEQ ID NO: 146. In some embodiments, the spacer sequence is SEQ ID NO: 148. In some embodiments, the spacer sequence is SEQ ID NO: 149. In some embodiments, the spacer sequence is SEQ ID NO: 150. In some embodiments, the spacer sequence is SEQ ID NO: 151. In some embodiments, the spacer sequence is SEQ ID NO: 179. In some embodiments, the spacer sequence is SEQ ID NO: 184. In some embodiments, the spacer sequence is SEQ ID NO: 201. In some embodiments, the spacer sequence is SEQ ID NO: 223. In some embodiments, the spacer sequence is SEQ ID NO: 224. In some embodiments, the spacer sequence is SEQ ID NO: 225.

[0548] In some embodiments, a method of treating Duchenne Muscular Dystrophy (DMD) is provided, the method comprising delivering to a cell: 1) a nucleic acid molecule comprising: a nucleic acid encoding one or more spacer sequences selected from SEQ ID NOs: 4062, 4063, 4068, 4069, 4070, 4071, 4072, 4073, 4078, 4079, 4088, 4089, 4096, 4097, 4098, 4099, 4100, 4101, 4102, 4103, 4158, 4159, 4168, 4169, 4202, 4203, 4220, 4221, 4246, 4247, 4248, 4249, 4250, 4251; a nucleic acid encoding a spacer sequence comprising at least 17, 18, 19, or 20 contiguous nucleotides of one or more spacer sequences selected from SEQ ID NOs: 4062, 4063, 4068, 4069, 4070, 4071, 4072, 4073, 4078, 4079, 4088, 4089, 4096, 4097, 4098, 4099, 4100, 4101, 4102, 4103, 4158, 4159, 4168, 4169, 4202, 4203, 4220, 4221, 4246, 4247, 4248, 4249, 4250, 4251; or a nucleic acid encoding one or more spacer sequences that is at least 90% identical to any one of SEQ ID NOs: 4062, 4063, 4068, 4069, 4070, 4071, 4072, 4073, 4078, 4079, 4088, 4089, 4096, 4097, 4098, 4099, 4100, 4101, 4102, 4103, 4158, 4159, 4168, 4169, 4202, 4203, 4220, 4221, 4246, 4247, 4248, 4249, 4250, 4251; and 2) a Staphylococcus lugdunensis (SluCas9) or a nucleic acid molecule encoding SluCas9. In some embodiments, a method of treating Duchenne Muscular Dystrophy (DMD) is provided, the method comprising delivering to a cell: a single nucleic acid molecule comprising: 1) a nucleic acid encoding one or more spacer sequences selected from SEQ ID NOs: 4062, 4063, 4068, 4069, 4070, 4071, 4072, 4073, 4078, 4079, 4088, 4089, 4096, 4097, 4098, 4099, 4100, 4101, 4102, 4103, 4158, 4159, 4168, 4169, 4202, 4203, 4220, 4221, 4246, 4247, 4248, 4249, 4250, 4251; a nucleic acid encoding one or more spacer sequences comprising at least 17, 18, 19, or 20 contiguous nucleotides of one or more spacer sequences selected from SEQ ID NOs: 4062, 4063, 4068, 4069, 4070, 4071, 4072, 4073, 4078, 4079, 4088, 4089, 4096, 4097, 4098, 4099, 4100, 4101, 4102, 4103, 4158, 4159, 4168, 4169, 4202, 4203, 4220, 4221, 4246, 4247, 4248, 4249, 4250, 4251; or a nucleic acid encoding one or more spacer sequences that is at least 90% identical to any one of SEQ ID NOs: 4062, 4063, 4068, 4069, 4070, 4071, 4072, 4073, 4078, 4079, 4088, 4089, 4096, 4097, 4098, 4099, 4100, 4101, 4102, 4103, 4158, 4159, 4168, 4169, 4202, 4203, 4220, 4221, 4246, 4247, 4248, 4249, 4250, 4251; and 2) a nucleic acid encoding Staphylococcus lugdunensis (SluCas9). In some embodiments, the spacer sequence is SEQ ID NO: 4062. In some embodiments, the spacer sequence is SEQ ID NO: 4063. In some embodiments, the spacer sequence is SEQ ID NO: 4068. In some embodiments, the spacer sequence is SEQ ID NO: 4069. In some embodiments, the spacer sequence is SEQ ID NO: 4070. In some embodiments, the spacer sequence is SEQ ID NO: 4071. In some embodiments, the spacer sequence is SEQ ID NO: 4072. In some embodiments, the spacer sequence is SEQ ID NO: 4073. In some embodiments, the spacer sequence is SEQ ID NO: 4078. In some embodiments, the spacer sequence is SEQ ID NO: 4079. In some embodiments, the spacer sequence is SEQ ID NO: 4088. In some embodiments, the spacer sequence is SEQ ID NO: 4089. In some embodiments, the spacer sequence is SEQ ID NO: 4096. In some embodiments, the spacer sequence is SEQ ID NO: 4097. In some embodiments, the spacer sequence is SEQ ID NO: 4098. In some embodiments, the spacer sequence is SEQ ID NO: 4099. In some embodiments, the spacer sequence is SEQ ID NO: 4100. In some embodiments, the spacer sequence is SEQ ID NO: 4101. In some embodiments, the spacer sequence is SEQ ID NO: 4102. In some embodiments, the spacer sequence is SEQ ID NO: 4103. In some embodiments, the spacer sequence is SEQ ID NO: 4158. In some embodiments, the spacer sequence is SEQ ID NO: 4159. In some embodiments, the spacer sequence is SEQ ID NO: 4168. In some embodiments, the spacer sequence is SEQ ID NO: 4169. In some embodiments, the spacer sequence is SEQ ID NO: 4202. In some embodiments, the spacer sequence is SEQ ID NO: 4203. In some embodiments, the spacer sequence is SEQ ID NO: 4220. In some embodiments, the spacer sequence is SEQ ID NO: 4221. In some embodiments, the spacer sequence is SEQ ID NO: 4246. In some embodiments, the spacer sequence is SEQ ID NO: 4247. In some embodiments, the spacer sequence is SEQ ID NO: 4248. In some embodiments, the spacer sequence is SEQ ID NO: 4249. In some embodiments, the spacer sequence is SEQ ID NO: 4250. In some embodiments, the spacer sequence is SEQ ID NO: 4251.

[0549] In some embodiments, the methods comprise delivering to a cell a nucleic acid molecule encoding SaCas9, wherein the SaCas9 comprises the amino acid sequence of SEQ ID NO: 711. In some embodiments, the methods comprise delivering to a cell a nucleic acid molecule encoding SaCas9, wherein the SaCas9 is a variant of the amino acid sequence of SEQ ID NO: 711. In some embodiments, the methods comprise delivering to a cell a nucleic acid molecule encoding SaCas9, wherein the SaCas9 comprises an amino acid sequence selected from any one of SEQ ID NOs: 715-717. In some embodiments, the methods comprise delivering to a cell a nucleic acid molecule encoding SaCas9, wherein the SaCas9 comprises the amino acid of SEQ ID NO: 715.

[0550] In some embodiments, the methods comprise delivering to a cell a nucleic acid molecule encoding SluCas9, wherein the SluCas9 comprises the amino acid sequence of SEQ ID NO: 712. In some embodiments, the methods comprise delivering to a cell a nucleic acid molecule encoding SluCas9, wherein the SaCas9 is a variant of the amino acid sequence of SEQ ID NO: 712. In some embodiments, the methods comprise delivering to a cell a nucleic acid molecule encoding SluCas9, wherein the SluCas9 comprises an amino acid sequence selected from any one of SEQ ID NOs: 718-720.

[0551] In some embodiments, methods are provided for treating Duchenne Muscular Dystrophy (DMD), the method comprising delivering to a cell a single nucleic acid molecule comprising: a nucleic acid encoding a pair of guide RNAs comprising: a first and second spacer sequence selected from any one of SEQ ID NOs: 10 and 15; 10 and 16; 12 and 16; 1001 and 1005; 1001 and 15; 1001 and 16; 1003 and 1005; 16 and 1003; 12 and 1010; 12 and 1012; 12 and 1013; 10 and 1016; 1017 and 1005; 1017 and 16; and 1018 and 16; and a nucleic acid encoding a Staphylococcus aureus Cas9 (SaCas9). In some embodiments, the first and second spacer sequence are selected from SEQ ID NOs: 10 and 15. In some embodiments, the first and second spacer sequence are selected from SEQ ID NOs: 10 and 16. In some embodiments, the first and second spacer sequence are selected from SEQ ID NOs: 12 and 16. In some embodiments, the first and second spacer sequence are selected from SEQ ID NOs: 1001 and 1005. In some embodiments, the first and second spacer sequence are selected from SEQ ID NOs: 1001 and 15. In some embodiments, the first and second spacer sequence are selected from SEQ ID NOs: 1001 and 16. In some embodiments, the first and second spacer sequence are selected from SEQ ID NOs: 1003 and 1005. In some embodiments, the first and second spacer sequence are selected from SEQ ID NOs: 16 and 1003. In some embodiments, the first and second spacer sequence are selected from SEQ ID NOs: 12 and 1010. In some embodiments, the first and second spacer sequence are selected from SEQ ID NOs: 12 and 1012. In some embodiments, the first and second spacer sequence are selected from SEQ ID NOs: 12 and 1013. In some embodiments, the first and second spacer sequence are selected from SEQ ID NOs: 10 and 1016. In some embodiments, the first and second spacer sequence are selected from SEQ ID NOs: 1017 and 16. In some embodiments, the first and second spacer sequence are selected from SEQ ID NOs: 1018 and 16.

[0552] In some embodiments, methods are provided for treating Duchenne Muscular Dystrophy (DMD), the method comprising delivering to a cell a single nucleic acid molecule comprising: a nucleic acid encoding a pair of guide RNAs comprising: a first and second spacer sequence comprising at least 17, 18, 19, 20, or 21 contiguous nucleotides of any one of SEQ ID NOs: 10 and 15; 10 and 16; 12 and 16; 1001 and 1005; 1001 and 15; 1001 and 16; 1003 and 1005; 16 and 1003; 12 and 1010; 12 and 1012; 12 and 1013; 10 and 1016; 1017 and 1005; 1017 and 16; and 1018 and 16; and a nucleic acid encoding a Staphylococcus aureus Cas9 (SaCas9).

[0553] In some embodiments, methods are provided for treating Duchenne Muscular Dystrophy (DMD), the method comprising delivering to a cell a single nucleic acid molecule comprising: a nucleic acid encoding a pair of guide RNAs comprising: a first and second spacer sequence that are selected from spacer sequences that are at least 90% identical to any one of SEQ ID NOs: 10 and 15; 10 and 16; 12 and 16; 1001 and 1005; 1001 and 15; 1001 and 16; 1003 and 1005; 16 and 1003; 12 and 1010; 12 and 1012; 12 and 1013; 10 and 1016; 1017 and 1005; 1017 and 16; and 1018 and 16; and a nucleic acid encoding a Staphylococcus aureus Cas9 (SaCas9).

[0554] In some embodiments, methods are provided for treating Duchenne Muscular Dystrophy (DMD), the method comprising delivering to a cell a single nucleic acid molecule comprising: a nucleic acid encoding a pair of guide RNAs comprising: a first and second spacer sequence selected from any one of SEQ ID NOs: 1001 and 1005; 1001 and 15; 1001 and 16; 1003 and 1005; 16 and 1003; 12 and 1010; 12 and 1012; 12 and 1013; 10 and 1016; 1017 and 1005; 1017 and 16; and 1018 and 16; and a nucleic acid encoding a Staphylococcus aureus Cas9 (SaCas9), wherein the nucleic acid encoding the SaCas9 comprises the amino acid sequence of SEQ ID NO: 715. In some embodiments, the first and second spacer sequence are selected from SEQ ID NOs: 1001 and 1005. In some embodiments, the first and second spacer sequence are selected from SEQ ID NOs: 1001 and 15. In some embodiments, the first and second spacer sequence are selected from SEQ ID NOs: 1001 and 16. In some embodiments, the first and second spacer sequence are selected from SEQ ID NOs: 1003 and 1005. In some embodiments, the first and second spacer sequence are selected from SEQ ID NOs: 16 and 1003. In some embodiments, the first and second spacer sequence are selected from SEQ ID NOs: 12 and 1010. In some embodiments, the first and second spacer sequence are selected from SEQ ID NOs: 12 and 1012. In some embodiments, the first and second spacer sequence are selected from SEQ ID NOs: 12 and 1013. In some embodiments, the first and second spacer sequence are selected from SEQ ID NOs: 10 and 1016. In some embodiments, the first and second spacer sequence are selected from SEQ ID NOs: 1017 and 16. In some embodiments, the first and second spacer sequence are selected from SEQ ID NOs: 1018 and 16.

[0555] In some embodiments, methods are provided for treating Duchenne Muscular Dystrophy (DMD), the method comprising delivering to a cell a single nucleic acid molecule comprising: a nucleic acid encoding a pair of guide RNAs comprising: a first and second spacer sequence comprising at least 17, 18, 19, 20, or 21 contiguous nucleotides of any one of SEQ ID NOs: 1001 and 1005; 1001 and 15; 1001 and 16; 1003 and 1005; 16 and 1003; 12 and 1010; 12 and 1012; 12 and 1013; 10 and 1016; 1017 and 1005; 1017 and 16; and 1018 and 16; and a nucleic acid encoding a Staphylococcus aureus Cas9 (SaCas9), wherein the nucleic acid encoding the SaCas9 comprises the amino acid sequence of SEQ ID NO: 715.

[0556] In some embodiments, methods are provided for treating Duchenne Muscular Dystrophy (DMD), the method comprising delivering to a cell a single nucleic acid molecule comprising: a nucleic acid encoding a pair of guide RNAs comprising: a first and second spacer sequence that is at least 90% identical to any one of SEQ ID NOs: 1001 and 1005; 1001 and 15; 1001 and 16; 1003 and 1005; 16 and 1003; 12 and 1010; 12 and 1012; 12 and 1013; 10 and 1016; 1017 and 1005; 1017 and 16; and 1018 and 16; and a nucleic acid encoding a Staphylococcus aureus Cas9 (SaCas9), wherein the nucleic acid encoding the SaCas9 comprises the amino acid sequence of SEQ ID NO: 715.

[0557] In some embodiments, methods are provided for treating Duchenne Muscular Dystrophy (DMD), the method comprising delivering to a cell a single nucleic acid molecule comprising: a nucleic acid encoding a pair of guide RNAs comprising: a first and second spacer sequence selected from any one of SEQ ID NOs: 148 and 134; 149 and 135; 150 and 135; 131 and 136; 151 and 136; 139 and 131; 139 and 151; 140 and 131; 140 and 151; 141 and 148; 144 and 149; 144 and 150; 145 and 131; 145 and 151; and 146 and 148; and a nucleic acid encoding a Staphylococcus lugdunensis (SluCas9). In some embodiments, the first and second spacer sequence are selected from SEQ ID NOs: 148 and 134. In some embodiments, the first and second spacer sequence are selected from SEQ ID NOs: 149 and 135. In some embodiments, the first and second spacer sequence are selected from SEQ ID NOs: 150 and 135. In some embodiments, the first and second spacer sequence are selected from SEQ ID NOs: 131 and 136. In some embodiments, the first and second spacer sequence are selected from SEQ ID NOs: 151 and 136. In some embodiments, the first and second spacer sequence are selected from SEQ ID NOs: 139 and 131. In some embodiments, the first and second spacer sequence are selected from SEQ ID NOs: 139 and 151. In some embodiments, the first and second spacer sequence are selected from SEQ ID NOs: 140 and 131. In some embodiments, the first and second spacer sequence are selected from SEQ ID NOs: 140 and 151. In some embodiments, the first and second spacer sequence are selected from SEQ ID NOs: 141 and 148. In some embodiments, the first and second spacer sequence are selected from SEQ ID NOs: 144 and 149. In some embodiments, the first and second spacer sequence are selected from SEQ ID NOs: 144 and 150. In some embodiments, the first and second spacer sequence are selected from SEQ ID NOs: 145 and 131. In some embodiments, the first and second spacer sequence are selected from SEQ ID NOs: 145 and 151. In some embodiments, the first and second spacer sequence are selected from SEQ ID NOs: 146 and 148.

[0558] In some embodiments, methods are provided for treating Duchenne Muscular Dystrophy (DMD), the method comprising delivering to a cell a single nucleic acid molecule comprising: a nucleic acid encoding a pair of guide RNAs comprising: a first and second spacer sequence comprising at least 17, 18, 19, 20, or 21 contiguous nucleotides of any one of SEQ ID NOs: 148 and 134; 149 and 135; 150 and 135; 131 and 136; 151 and 136; 139 and 131; 139 and 151; 140 and 131; 140 and 151; 141 and 148; 144 and 149; 144 and 150; 145 and 131; 145 and 151; and 146 and 148; and a nucleic acid encoding a Staphylococcus lugdunensis (SluCas9).

[0559] In some embodiments, methods are provided for treating Duchenne Muscular Dystrophy (DMD), the method comprising delivering to a cell a single nucleic acid molecule comprising: a nucleic acid encoding a pair of guide RNAs comprising: a first and second spacer sequence that are selected from spacer sequences that are at least 90% identical to any one of SEQ ID NOs: 148 and 134; 149 and 135; 150 and 135; 131 and 136; 151 and 136; 139 and 131; 139 and 151; 140 and 131; 140 and 151; 141 and 148; 144 and 149; 144 and 150; 145 and 131; 145 and 151; and 146 and 148; and a nucleic acid encoding a Staphylococcus lugdunensis (SluCas9).

[0560] In some embodiments, methods are provided for excising a portion of an exon with a premature stop codon in a subject with Duchenne Muscular Dystrophy (DMD), the method comprising delivering to a cell a single nucleic acid molecule comprising: (i) a nucleic acid encoding a pair of guide RNAs wherein the first guide RNA binds to a target sequence within the exon that is upstream of the premature stop codon, and wherein the second guide RNA binds to a sequence that is downstream of the premature stop codon and downstream of the sequence bound by the first guide RNA; and (ii) a nucleic acid encoding a Staphylococcus aureus Cas9 (SaCas9); wherein the pair of guide RNAs and SaCas9 excise a portion of the exon. In some embodiments, the single nucleic acid molecule is delivered to the cell on a single vector. In some embodiments, the portions of the exon remaining after excision are rejoined with a one nucleotide insertion. In some embodiments, the portions of the exon remaining after excision are rejoined without a nucleotide insertion. Precise segmental deletion means that the dual cut process takes out a specific deletion. This precise deletion can lead to exon reframing (see e.g., FIG. 6). In some embodiments, the size of excised portion is between 5 and 250, 5 and 225, 5 and 200, 5 and 190, 5 and 180, 5 and 170, 5 and 160, 5 and 150, 5 and 125, 5 and 120, 5 and 115, 5 and 110, 5 and 100, 5 and 95, 5 and 90, 5 and 85, 5 and 80, 5 and 75, 5 and 70, 5 and 65, 5 and 60, 5 and 55, 5 and 50, 5 and 45, 5 and 40, 5 and 35, 5 and 30, 5 and 25, 5 and 20, 5 and 15, and 5-10 nucleotides. In some embodiments, the size of excised portion is between 20 and 250, 20 and 225, 20 and 200, 20 and 190, 20 and 180, 20 and 170, 20 and 160, 20 and 150, 20 and 125, 20 and 120, 20 and 115, 20 and 110, 20 and 100, 20 and 95, 20 and 90, 20 and 85, 20 and 80, 20 and 75, 20 and 70, 20 and 65, 20 and 60, 20 and 55, 20 and 50, 20 and 45, 20 and 40, 20 and 35, 20 and 30, and 20 and 25 nucleotides. In some embodiments, the size of excised portion is between 50 and 250, 50 and 225, 50 and 200, 50 and 190, 50 and 180, 50 and 170, 50 and 160, 50 and 150, 50 and 125, 50 and 120, 50 and 115, 50 and 110, and 50 and 100 nucleotides. In some embodiments, the size of excised portion of the exon is between 8 and 167 nucleotides. In some embodiments, the exon is exon 45 of the dystrophin gene. In some embodiments, the pair of guide RNAs comprise a first and second spacer sequence of SEQ ID NOs: 10 and 15 (or SEQ ID Nos: 15 and 10). In some embodiments, the pair of guide RNAs comprise a first and second spacer sequence of SEQ ID NOs: 10 and 16 (or SEQ ID Nos: 16 and 10). In some embodiments, the pair of guide RNAs comprise a first and second spacer sequence of SEQ ID NOs: 12 and 16 (or SEQ ID Nos: 16 and 12). In some embodiments, the pair of guide RNAs comprise a first and second spacer sequence of SEQ ID NOs: 1001 and 1005 (or SEQ ID Nos: 1005 and 1001). In some embodiments, the pair of guide RNAs comprise a first and second spacer sequence of SEQ ID NOs: 1001 and 15 (or SEQ ID Nos: 15 and 1001). In some embodiments, the pair of guide RNAs comprise a first and second spacer sequence of SEQ ID NOs: 1001 and 16 (or SEQ ID Nos: 16 and 1001). In some embodiments, the pair of guide RNAs comprise a first and second spacer sequence of SEQ ID NOs: 1003 and 1005 (or SEQ ID Nos: 1005 and 1003). In some embodiments, the pair of guide RNAs comprise a first and second spacer sequence of SEQ ID NOs: 16 and 1003 (or SEQ ID Nos: 1003 and 16). In some embodiments, the pair of guide RNAs comprise a first and second spacer sequence of SEQ ID NOs: 12 and 1010 (or SEQ ID Nos: 1010 and 12). In some embodiments, the pair of guide RNAs comprise a first and second spacer sequence of SEQ ID NOs: 12 and 1012 (or SEQ ID Nos: 1012 and 12). In some embodiments, the pair of guide RNAs comprise a first and second spacer sequence of SEQ ID NOs: 12 and 1013 (or SEQ ID Nos: 1013 and 12). In some embodiments, the pair of guide RNAs comprise a first and second spacer sequence of SEQ ID NOs: 10 and 1016 (or SEQ ID Nos: 1016 and 10). In some embodiments, the pair of guide RNAs comprise a first and second spacer sequence of SEQ ID NOs: 1017 and 16 (or SEQ ID Nos: 16 and 1017). In some embodiments, the pair of guide RNAs comprise a first and second spacer sequence of SEQ ID NOs: 1018 and 16 (or SEQ ID Nos: 16 and 1018). In some embodiments, the SaCas9 comprises the amino acid sequence of SEQ ID NO: 715.

[0561] In some embodiments, methods are provided for excising a portion of an exon with a premature stop codon in a subject with Duchenne Muscular Dystrophy (DMD), the method comprising delivering to a cell a single nucleic acid molecule comprising: (i) a nucleic acid encoding a pair of guide RNAs wherein the first guide RNA binds to a target sequence within the exon that is upstream of the premature stop codon, and wherein the second guide RNA binds to a sequence that is downstream of the premature stop codon and downstream of the sequence bound by the first guide RNA; and (ii) a nucleic acid encoding a Staphylococcus lugdunensis (SluCas9); wherein the pair of guide RNAs and SluCas9 excise a portion of the exon. In some embodiments, the single nucleic acid molecule is delivered to the cell on a single vector. In some embodiments, the portions of the exon remaining after excision are rejoined with a one nucleotide insertion. In some embodiments, the portions of the exon remaining after excision are rejoined without a nucleotide insertion. In some embodiments, the size of excised portion of the exon is between 8 and 167 nucleotides. In some embodiments, the exon is exon 45 of the dystrophin gene. In some embodiments, the pair of guide RNAs comprise a first and second spacer sequence of SEQ ID NOs: 148 and 134 (or SEQ ID Nos: 134 and 148). In some embodiments, the pair of guide RNAs comprise a first and second spacer sequence of SEQ ID NOs: 149 and 135 (or SEQ ID Nos: 135 and 149). In some embodiments, the pair of guide RNAs comprise a first and second spacer sequence of SEQ ID NOs: 150 and 135 (or SEQ ID Nos: 135 and 150). In some embodiments, the pair of guide RNAs comprise a first and second spacer sequence of SEQ ID NOs: 131 and 136 (or SEQ ID Nos: 136 and 131). In some embodiments, the pair of guide RNAs comprise a first and second spacer sequence of SEQ ID NOs: 151 and 136 (or SEQ ID Nos: 136 and 151). In some embodiments, the pair of guide RNAs comprise a first and second spacer sequence of SEQ ID NOs: 139 and 131 (or SEQ ID Nos: 131 and 139). In some embodiments, the pair of guide RNAs comprise a first and second spacer sequence of SEQ ID NOs: 139 and 151 (or SEQ ID Nos: 151 and 139). In some embodiments, the pair of guide RNAs comprise a first and second spacer sequence of SEQ ID NOs: 140 and 131 (or SEQ ID Nos: 131 and 140). In some embodiments, the pair of guide RNAs comprise a first and second spacer sequence of SEQ ID NOs: 140 and 151 (or SEQ ID Nos: 151 and 140). In some embodiments, the pair of guide RNAs comprise a first and second spacer sequence of SEQ ID NOs: 141 and 148 (or SEQ ID Nos: 148 and 141). In some embodiments, the pair of guide RNAs comprise a first and second spacer sequence of SEQ ID NOs: 144 and 149 (or SEQ ID Nos: 149 and 144). In some embodiments, the pair of guide RNAs comprise a first and second spacer sequence of SEQ ID NOs: 144 and 150 (or SEQ ID Nos: 150 and 144). In some embodiments, the pair of guide RNAs comprise a first and second spacer sequence of SEQ ID NOs: 145 and 131 (or SEQ ID Nos: 131 and 145). In some embodiments, the pair of guide RNAs comprise a first and second spacer sequence of SEQ ID NOs: 145 and 151 (or SEQ ID Nos: 151 and 145). In some embodiments, the pair of guide RNAs comprise a first and second spacer sequence of SEQ ID NOs: 146 and 148 (or SEQ ID Nos: 148 and 146).

[0562] In some embodiments, the subject is a mammal. In some embodiments, the subject is human

[0563] For treatment of a subject (e.g., a human), any of the compositions disclosed herein may be administered in a manner compatible with the dosage formulation and in such amount as is therapeutically effective. The compositions may be readily administered in a variety of dosage forms, such as injectable solutions. For parenteral administration in an aqueous solution, for example, the solution will generally be suitably buffered and the liquid diluent first rendered isotonic with, for example, sufficient saline or glucose. Such aqueous solutions may be used, for example, for intravenous, intramuscular, subcutaneous, and/or intraperitoneal administration.

### Combination Therapy

[0564] In some embodiments, the invention comprises combination therapies comprising any of the methods or uses described herein together with an additional therapy suitable for ameliorating DMD.

### Delivery of Guide RNA Compositions

[0565] The methods and uses disclosed herein may use any suitable approach for delivering the guide RNAs and compositions described herein. Exemplary delivery approaches include vectors, such as viral vectors; lipid nanoparticles; transfection; and electroporation. In some embodiments, vectors or LNPs associated with the single-vector guide RNAs/Cas9's disclosed herein are for use in preparing a medicament for treating DMD.

[0566] Where a vector is used, it may be a viral vector, such as a non-integrating viral vector. In some embodiments, viral vector is an adeno-associated virus vector, a lentiviral vector, an integrase-deficient lentiviral vector, an adenoviral vector, a vaccinia viral vector, an alphaviral vector, or a herpes simplex viral vector. In some embodiments, the viral vector is an adeno-associated virus (AAV) vector. In some embodiments, the AAV vector is an AAV1, AAV2, AAV3, AAV4, AAVS, AAV6, AAV7, AAV8, AAVrh10 (see, e.g., SEQ ID NO: 81 of U.S. Pat. No. 9,790,472, which is incorporated by reference herein in its entirety), AAVrh74 (see, e.g., SEQ ID NO: 1 of US 2015/0111955, which is incorporated by reference herein in its entirety), or AAV9 vector, wherein the number following AAV indicates the AAV serotype. In some embodiments, the AAV vector is a single-stranded AAV (ssAAV). In some embodiments, the AAV vector is a double-stranded AAV (dsAAV). Any variant of an AAV vector or serotype thereof, such as a self-complementary AAV (scAAV) vector, is encompassed within the general terms AAV vector, AAV1 vector, etc. See, e.g., McCarty et al., Gene Ther. 2001; 8:1248-54, Naso et al., BioDrugs 2017; 31:317-334, and references cited therein for detailed discussion of various AAV vectors. In some embodiments, the AAV vector size is measured in length of nucleotides from ITR to ITR, inclusive of both ITRs. In some embodiments, the AAV vector is less than 5 kb in size from ITR to ITR, inclusive of both ITRs. In particular embodiments, the AAV vector is less than 4.9 kb from ITR to ITR in size, inclusive of both ITRs. In further embodiments, the AAV vector is less than 4.85 kb in size from ITR to ITR, inclusive of both ITRs. In further embodiments, the AAV vector is less than 4.8 kb in size from ITR to ITR, inclusive of both ITRs. In further embodiments, the AAV vector is less than 4.75 kb in size from ITR to ITR, inclusive of both ITRs. In further embodiments, the AAV vector is less than 4.7 kb in size from ITR to ITR, inclusive of both ITRs. In some embodiments, the vector is between 3.9-5 kb, 4-5 kb, 4.2-5 kb, 4.4-5 kb, 4.6-5 kb, 4.7-5 kb, 3.9-4.9 kb, 4.2-4.9 kb, 4.4-4.9 kb, 4.7-4.9 kb, 3.9-4.85 kb, 4.2-4.85 kb, 4.4-4.85 kb, 4.6-4.85 kb, 4.7-4.85 kb, 4.7-4.9 kb, 3.9-4.8 kb, 4.2-4.8 kb, 4.4-4.8 kb or 4.6-4.8 kb from ITR to ITR in size, inclusive of both ITRs. In some embodiments, the vector is between 4.4-4.85 kb in size from ITR to ITR, inclusive of both ITRs. In some embodiments, the vector is an AAV9 vector.

[0567] In some embodiments, the vector (e.g., viral vector, such as an adeno-associated viral vector) comprises a tissue-specific (e.g., muscle-specific) promoter, e.g., which is operatively linked to a sequence encoding the guide RNA. In some embodiments, the muscle-specific promoter is a muscle creatine kinase promoter, a desmin promoter, an MHCK7 promoter, or an SPc5-12 promoter. In some embodiments, the muscle-specific promoter is a CK8 promoter. In some embodiments, the muscle-specific promoter is a CK8e promoter. Muscle-specific promoters are described in detail, e.g., in US2004/0175727 A1; Wang et al., Expert Opin Drug Deliv. (2014) 11, 345-364; Wang et al., Gene Therapy (2008) 15, 1489-1499. In some embodiments, the tissue-specific promoter is a neuron-specific promoter, such as an enolase promoter. See, e.g., Naso et al., BioDrugs 2017; 31:317-334; Dashkoff et al., Mol Ther Methods Clin Dev. 2016; 3:16081, and references cited therein for detailed discussion of tissue-specific promoters including neuron-specific promoters.

[0568] In some embodiments, in addition to guide RNA and Cas9 sequences, the vectors further comprise nucleic acids that do not encode guide RNAs. Nucleic acids that do not encode guide RNA and Cas9 include, but are not limited to, promoters, enhancers, and regulatory sequences. In some embodiments, the vector comprises one or more nucleotide sequence(s) encoding a crRNA, a trRNA, or a crRNA and trRNA.

[0569] Lipid nanoparticles (LNPs) are a known means for delivery of nucleotide and protein cargo, and may be used for delivery of the guide RNAs, compositions, or pharmaceutical formulations disclosed herein. In some embodiments, the LNPs deliver nucleic acid, protein, or nucleic acid together with protein.

[0570] Electroporation is a well-known means for delivery of cargo, and any electroporation methodology may be used for delivering the single vectors disclosed herein.

[0571] In some embodiments, the invention comprises a method for delivering any one of the single vectors disclosed herein to an ex vivo cell, wherein the guide RNA is encoded by a vector, associated with an LNP, or in aqueous solution. In some embodiments, the guide RNA/LNP or guide RNA is also associated with a Cas9 or sequence encoding Cas9 (e.g., in the same vector, LNP, or solution).

[0572] In some embodiments, the disclosure provides for methods of using any of the guides, endonucleases, cells, or compositions disclosed herein in research methods. For example, any of the guides or endonucleases disclosed herein may be used alone or in combination in experiments under various parameters (e.g., temperatures, pH, types of cells) or combined with other reagents to evaluate the activity of the guides and/or endonucleases.

[0573] Further embodiments encompassed by the disclosure are as follows.
[0574] Embodiment B 1 is a composition comprising a single nucleic acid molecule encoding one or more guide RNAs and a Cas9, wherein the single nucleic acid molecule comprises:
   [0575] a. a first nucleic acid encoding one or more spacer sequences selected from any one of SEQ ID NOs: 1-35, 1000-1078, or 3000-3069 and a second nucleic acid encoding a Staphylococcus aureus Cas9 (SaCas9);
   [0576] b. a first nucleic acid encoding one or more spacer sequences selected from any one of SEQ ID NOs: 100-225, 2000-2116, or 4000-4251 and a second nucleic acid encoding a Staphylococcus lugdunensis (SluCas9);
   [0577] c. a first nucleic acid encoding one or more spacer sequences comprising at least 17, 18, 19, or 20 contiguous nucleotides of a spacer sequence selected from any one of SEQ ID NOs: 1-35, 1000-1078, or 3000-3069 and a second nucleic acid encoding a Staphylococcus aureus Cas9 (SaCas9);
   [0578] d. a first nucleic acid encoding one or more spacer sequences comprising at least 17, 18, 19, or 20 contiguous nucleotides of a spacer sequence selected from any one of SEQ ID NOs: 100-225, 2000-2116, or 4000-4251 and a second nucleic acid encoding a Staphylococcus lugdunensis (SluCas9);
   [0579] e. a first nucleic acid encoding one or more spacer sequences that is at least 90% identical to any one of SEQ ID NOs: 1-35, 1000-1078, or 3000-3069 and a second nucleic acid encoding a Staphylococcus aureus Cas9 (SaCas9);
   [0580] f. a first nucleic acid encoding one or more spacer sequences that is at least 90% identical to any one of SEQ ID NOs: 100-225, 2000-2116, or 4000-4251 and a second nucleic acid encoding a Staphylococcus lugdunensis (SluCas9);
   [0581] g. a first nucleic acid encoding a pair of guide RNAs comprising a first and second spacer sequence selected from any one of SEQ ID NOs: 10 and 15; 10 and 16; 12 and 16; 1001 and 1005; 1001 and 15; 1001 and 16; 1003 and 1005; 16 and 1003; 12 and 1010; 12 and 1012; 12 and 1013; 10 and 1016; 1017 and 1005; 1017 and 16; 1018 and 16; 15 and 10; 16 and 10; 16 and 12; 1005 and 1001; 15 and 1001; 16 and 1001; 1005 and 1003; 1003 and 16; 1010 and 12; 1012 and 12; 1013 and 12; 1016 and 10; 1005 and 1017; 16 and 1017; and 16 and 1018; and a second nucleic acid encoding a Staphylococcus aureus Cas9 (SaCas9).
   [0582] h. a first nucleic acid encoding a pair of guide RNAs comprising at least 17, 18, 19, 20, or 21 contiguous nucleotides of a first and second spacer sequence selected from any one of SEQ ID NOs: 10 and 15; 10 and 16; 12 and 16; 1001 and 1005; 1001 and 15; 1001 and 16; 1003 and 1005; 16 and 1003; 12 and 1010; 12 and 1012; 12 and 1013; 10 and 1016; 1017 and 1005; 1017 and 16; 1018 and 16; 15 and 10; 16 and 10; 16 and 12; 1005 and 1001; 15 and 1001; 16 and 1001; 1005 and 1003; 1003 and 16; 1010 and 12; 1012 and 12; 1013 and 12; 1016 and 10; 1005 and 1017; 16 and 1017; and 16 and 1018; and a second nucleic acid encoding a Staphylococcus aureus Cas9 (SaCas9);
   [0583] i. a first nucleic acid encoding a pair of guide RNAs that is at least 90% identical to a first and second spacer sequence selected from any one of SEQ ID NOs: 10 and 15; 10 and 16; 12 and 16; 1001 and 1005; 1001 and 15; 1001 and 16; 1003 and 1005; 16 and 1003; 12 and 1010; 12 and 1012; 12 and 1013; 10 and 1016; 1017 and 1005; 1017 and 16; 1018 and 16; 15 and 10; 16 and 10; 16 and 12; 1005 and 1001; 15 and 1001; 16 and 1001; 1005 and 1003; 1003 and 16; 1010 and 12; 1012 and 12; 1013 and 12; 1016 and 10; 1005 and 1017; 16 and 1017; and 16 and 1018; and a second nucleic acid encoding a Staphylococcus aureus Cas9 (SaCas9);
   [0584] j. a first nucleic acid encoding a pair of guide RNAs comprising a first and second spacer sequence selected from any one of SEQ ID NOs: 148 and 134; 149 and 135; 150 and 135; 131 and 136; 151 and 136; 139 and 131; 139 and 151; 140 and 131; 140 and 151; 141 and 148; 144 and 149; 144 and 150; 145 and 131; 145 and 151; 146 and 148; 134 and 148; 135 and 149; 135 and 150; 136 and 131; 136 and 151; 131 and 139; 151 and 139; 131 and 140; 151 and 140; 148 and 141; 149 and 144; 150 and 144; 131 and 145; 151 and 145; and 148 and 146; and a second nucleic acid encoding a Staphylococcus lugdunensis (SluCas9);
   [0585] k. a first nucleic acid encoding a pair of guide RNAs comprising at least 17, 18, 19, 20, or 21 contiguous nucleotides of a first and second spacer sequence selected from any one of SEQ ID NOs: 148 and 134; 149 and 135; 150 and 135; 131 and 136; 151 and 136; 139 and 131; 139 and 151; 140 and 131; 140 and 151; 141 and 148; 144 and 149; 144 and 150; 145 and 131; 145 and 151; 146 and 148; 134 and 148; 135 and 149; 135 and 150; 136 and 131; 136 and 151; 131 and 139; 151 and 139; 131 and 140; 151 and 140; 148 and 141; 149 and 144; 150 and 144; 131 and 145; 151 and 145; and 148 and 146; and a second nucleic acid encoding a Staphylococcus lugdunensis (SluCas9); or
   [0586] l. a first nucleic acid encoding a pair of guide RNAs that is at least 90% identical to a first and second spacer sequence selected from any one of SEQ ID NOs: 148 and 134; 149 and 135; 150 and 135; 131 and 136; 151 and 136; 139 and 131; 139 and 151; 140 and 131; 140 and 151; 141 and 148; 144 and 149; 144 and 150; 145 and 131; 145 and 151; 146 and 148; 134 and 148; 135 and 149; 135 and 150; 136 and 131; 136 and 151; 131 and 139; 151 and 139; 131 and 140; 151 and 140; 148 and 141; 149 and 144; 150 and 144; 131 and 145; 151 and 145; and 148 and 146; and a second nucleic acid encoding a Staphylococcus lugdunensis (SluCas9).
[0587] Embodiment B 2 is the composition of claim 1, wherein the guide RNA is an sgRNA.
[0588] Embodiment B 3 is the composition of claim 1, wherein the guide RNA is modified.
[0589] Embodiment B 4 is the composition of claim 3, wherein the modification alters one or more 2′ positions and/or phosphodiester linkages.
[0590] Embodiment B 5 is the composition of any one of claims 3-4, wherein the modification alters one or more, or all, of the first three nucleotides of the guide RNA.
[0591] Embodiment B 6 is the composition of any one of claims 3-5, wherein the modification alters one or more, or all, of the last three nucleotides of the guide RNA.
[0592] Embodiment B 7 is the composition of any one of claims 3-6, wherein the modification includes one or more of a phosphorothioate modification, a 2′-OMe modification, a 2′-O-MOE modification, a 2′-F modification, a 2′-O-methine-4′ bridge modification, a 3′-thiophosphonoacetate modification, or a 2′-deoxy modification.
[0593] Embodiment B 8 is the composition of any one of the preceding claims, wherein the composition further comprises a pharmaceutically acceptable excipient.
[0594] Embodiment B 9 is the composition of any one of the preceding claims, wherein the single nucleic acid molecule is associated with a lipid nanoparticle (LNP).
[0595] Embodiment B 10 is the composition of any one of claims 1-8, wherein the single nucleic acid molecule is a viral vector.
[0596] Embodiment B 11 is the composition of claim 10, wherein the viral vector is an adeno-associated virus vector, a lentiviral vector, an integrase-deficient lentiviral vector, an adenoviral vector, a vaccinia viral vector, an alphaviral vector, or a herpes simplex viral vector.
[0597] Embodiment B 12 is the composition of claim 10, wherein the viral vector is an adeno-associated virus (AAV) vector.
[0598] Embodiment B 13 is the composition of claim 12, wherein the AAV vector is an AAV1, AAV2, AAV3, AAV4, AAV5, AAV6, AAV7, AAV8, AAVrh10, AAVrh74, or AAV9 vector, wherein the number following AAV indicates the AAV serotype.
[0599] Embodiment B 14 is the composition of claim 13, wherein the AAV vector is an AAV serotype 9 vector.
[0600] Embodiment B 15 is the composition of claim 13, wherein the AAV vector is an AAVrh10 vector.
[0601] Embodiment B 16 is the composition of claim 13, wherein the AAV vector is an AAVrh74 vector.
[0602] Embodiment B 17 is the composition of any one of claims 10-16, comprising a viral vector, wherein the viral vector comprises a tissue-specific promoter.
[0603] Embodiment B 18 is the composition of any one of claims 10-16, comprising a viral vector, wherein the viral vector comprises a muscle-specific promoter, optionally wherein the muscle-specific promoter is a muscle creatine kinase promoter, a desmin promoter, an MHCK7 promoter, an SPc5-12 promoter, or a CK8e promoter.
[0604] Embodiment B 19 is the composition of any one of claims 10-16, comprising a viral vector, wherein the viral vector comprises a U6, H1, or 7SK promoter.
[0605] Embodiment B 20 is the composition of any one of claims 1-19, comprising a nucleic acid encoding SaCas9, wherein the spacer sequence is selected from any one of SEQ ID NOs: 12, 15, 16, 20, 27, 28, 32, 33, and 35.
[0606] Embodiment B 21 is the composition of any one of claims 1-20, comprising a nucleic acid encoding SaCas9, wherein the SaCas9 comprises the amino acid sequence of SEQ ID NO: 711.
[0607] Embodiment B 22 is the composition of any one of claims 1-20, comprising a nucleic acid encoding SaCas9, wherein the SaCas9 is a variant of the amino acid sequence of SEQ ID NO: 711.
[0608] Embodiment B 23 is the composition of any one of claims 1-20, comprising a nucleic acid encoding SaCas9, wherein the SaCas9 comprises an amino acid sequence selected from any one of SEQ ID NOs: 715-717.
[0609] Embodiment B 24 is the composition of any one of claims 1-19, comprising a nucleic acid encoding SluCas9, wherein the spacer sequence is selected from any one of SEQ ID NOs: 131, 134, 135, 136, 139, 144, 148, 149, 150, 151, 179, 184, 201, 210, 223, 224, 225.
[0610] Embodiment B 25 is the composition of any one of claim 1-19, or 24, comprising a nucleic acid encoding SluCas9, wherein the SluCas9 comprises the amino acid sequence of SEQ ID NO: 712.
[0611] Embodiment B 26 is the composition of any one of claim 1-19, or 24, comprising a nucleic acid encoding SluCas9, wherein the SluCas9 is a variant of the amino acid sequence of SEQ ID NO: 712.
[0612] Embodiment B 27 is the composition of any one of claim 1-19, or 24, comprising a nucleic acid encoding SluCas9, wherein the SluCas9 comprises an amino acid sequence selected from any one of SEQ ID NOs: 718-720.
[0613] Embodiment B 28 is the composition of any one of claims 1-27 and a pharmaceutically acceptable excipient.
[0614] Embodiment B 29 is a composition comprising a guide RNA comprising any one of SEQ ID

[0615] NOs: 1-35, 1000-1078, or 3000-3069.
[0616] Embodiment B 30 is a composition comprising a guide RNA comprising any one of SEQ ID

[0617] NOs: 100-225, 2000-2116, or 4000-4251.
[0618] Embodiment B 31 is the composition of any one of claims 1-30 for use in treating Duchenne

[0619] Muscular Dystrophy (DMD).
[0620] Embodiment B 32 is the composition of any one of claims 1-30 for use in making a double strand break in any one or more of exons 43, 44, 45, 50, 51, or 53 of the dystrophin gene.
[0621] Embodiment B 33 is a method of treating Duchenne Muscular Dystrophy (DMD), the method comprising delivering to a cell the composition of any one of claims 1-30.
[0622] Embodiment B 34 is a method of treating Duchenne Muscular Dystrophy (DMD), the method comprising delivering to a cell a single nucleic acid molecule comprising:
   [0623] i) a nucleic acid encoding one or more guide RNAs, wherein the one or more guide RNAs comprise:
      [0624] a. a spacer sequence selected from SEQ ID NOs: 1-35, 1000-1078, or 3000-3069;
      [0625] b. a spacer sequence comprising at least 17, 18, 19, or 20 contiguous nucleotides of a spacer sequence selected from SEQ ID NOs: 1-35, 1000-1078, or 3000-3069; or
      [0626] c. a spacer sequence that is at least 90% identical to any one of SEQ ID NOs: 1-35, 1000-1078, 3000-3069; and
   [0627] ii) a nucleic acid encoding a Staphylococcus aureus Cas9 (SaCas9).
[0628] Embodiment B 35 is a method of treating Duchenne Muscular Dystrophy (DMD), the method comprising delivering to a cell a single nucleic acid molecule comprising:
   [0629] i) a nucleic acid molecule encoding one or more guide RNAs, wherein the one or more guide RNAs comprise:
      [0630] a. a spacer sequence selected from SEQ ID NOs: 100-225, 2000-2116, or 4000-4251;
      [0631] b. a spacer sequence comprising at least 17, 18, 19, or 20 contiguous nucleotides of a spacer sequence selected from SEQ ID NOs: 100-225, 2000-2116, or 4000-4251; or
      [0632] c. a spacer sequence that is at least 90% identical to any one of SEQ ID NOs: 100-225, 2000-2116, or 4000-4251; and
   [0633] ii) a nucleic acid molecule encoding Staphylococcus lugdunensis (SluCas9).
[0634] Embodiment B 36 is a method of treating Duchenne Muscular Dystrophy (DMD), the method comprising delivering to a cell a single nucleic acid molecule comprising:
   [0635] i) a nucleic acid encoding a pair of guide RNAs comprising:
      [0636] m. a first and second spacer sequence selected from any one of SEQ ID NOs: 10 and 15; 10 and 16; 12 and 16; 1001 and 1005; 1001 and 15; 1001 and 16; 1003 and 1005; 16 and 1003; 12 and 1010; 12 and 1012; 12 and 1013; 10 and 1016; 1017 and 1005; 1017 and 16; 1018 and 16; 15 and 10; 16 and 10; 16 and 12; 1005 and 1001; 15 and 1001; 16 and 1001; 1005 and 1003; 1003 and 16; 1010 and 12; 1012 and 12; 1013 and 12; 1016 and 10; 1005 and 1017; 16 and 1017; and 16 and 1018;
      [0637] n. a first and second spacer sequence comprising at least 17, 18, 19, 20, or 21 contiguous nucleotides of any one of SEQ ID NOs: 10 and 15; 10 and 16; 12 and 16; 1001 and 1005; 1001 and 15; 1001 and 16; 1003 and 1005; 16 and 1003; 12 and 1010; 12 and 1012; 12 and 1013; 10 and 1016; 1017 and 1005; 1017 and 16; 1018 and 16; 15 and 10; 16 and 10; 16 and 12; 1005 and 1001; 15 and 1001; 16 and 1001; 1005 and 1003; 1003 and 16; 1010 and 12; 1012 and 12; 1013 and 12; 1016 and 10; 1005 and 1017; 16 and 1017; and 16 and 1018; or
      [0638] o. a first and second spacer sequence that is at least 90% identical to any one of SEQ ID NOs: 10 and 15; 10 and 16; 12 and 16; 1001 and 1005; 1001 and 15; 1001 and 16; 1003 and 1005; 16 and 1003; 12 and 1010; 12 and 1012; 12 and 1013; 10 and 1016; 1017 and 1005; 1017 and 16; 1018 and 16; 15 and 10; 16 and 10; 16 and 12; 1005 and 1001; 15 and 1001; 16 and 1001; 1005 and 1003; 1003 and 16; 1010 and 12; 1012 and 12; 1013 and 12; 1016 and 10; 1005 and 1017; 16 and 1017; and 16 and 1018; and
   [0639] ii) a nucleic acid encoding a Staphylococcus aureus Cas9 (SaCas9).
[0640] Embodiment B 37 is a method of treating Duchenne Muscular Dystrophy (DMD), the method comprising delivering to a cell a single nucleic acid molecule comprising:
   [0641] i) a nucleic acid encoding a pair of guide RNAs comprising:
      [0642] p. a first and second spacer sequence selected from any one of SEQ ID NOs: 148 and 134; 149 and 135; 150 and 135; 131 and 136; 151 and 136; 139 and 131; 139 and 151; 140 and 131; 140 and 151; 141 and 148; 144 and 149; 144 and 150; 145 and 131; 145 and 151; and 146 and 148;
      [0643] q. a first and second spacer sequence comprising at least 17, 18, 19, 20, or 21 contiguous nucleotides of any one of SEQ ID NOs: 148 and 134; 149 and 135; 150 and 135; 131 and 136; 151 and 136; 139 and 131; 139 and 151; 140 and 131; 140 and 151; 141 and 148; 144 and 149; 144 and 150; 145 and 131; 145 and 151; 146 and 148; 134 and 148; 135 and 149; 135 and 150; 136 and 131; 136 and 151; 131 and 139; 151 and 139; 131 and 140; 151 and 140; 148 and 141; 149 and 144; 150 and 144; 131 and 145; 151 and 145; and 148 and 146; or
      [0644] r. a first and second spacer sequence that is at least 90% identical to any one of SEQ ID NOs: 148 and 134; 149 and 135; 150 and 135; 131 and 136; 151 and 136; 139 and 131; 139 and 151; 140 and 131; 140 and 151; 141 and 148; 144 and 149; 144 and 150; 145 and 131; 145 and 151; 146 and 148; 134 and 148; 135 and 149; 135 and 150; 136 and 131; 136 and 151; 131 and 139; 151 and 139; 131 and 140; 151 and 140; 148 and 141; 149 and 144; 150 and 144; 131 and 145; 151 and 145; and 148 and 146; and
   [0645] ii) a nucleic acid encoding a Staphylococcus lugdunensis (SluCas9).
[0646] Embodiment B 38 is the method of any one of claims 34-37, wherein the single nucleic acid molecule is delivered to the cell on a single vector.
[0647] Embodiment B 39 is the method of any one of claims 34-38, comprising a nucleic acid molecule encoding SaCas9, wherein the spacer sequence is selected from any one of SEQ ID NOs: 12, 15, 16, 20, 27, 28, 32, 33, and 35.
[0648] Embodiment B 40 is the method of any one of claims 34-39, comprising a nucleic acid molecule encoding SaCas9, wherein the SaCas9 comprises the amino acid sequence of SEQ ID NO: 711.
[0649] Embodiment B 41 is the method of any one of claims 34-39, comprising a nucleic acid molecule encoding SaCas9, wherein the SaCas9 is a variant of the amino acid sequence of SEQ ID NO: 711.
[0650] Embodiment B 42 is the method of any one of claims 34-39, comprising a nucleic acid molecule encoding SaCas9, wherein the SaCas9 comprises an amino acid sequence selected from any one of SEQ ID NOs: 715-717.
[0651] Embodiment B 43 is the method of any one of claims 34-38, comprising a nucleic acid molecule encoding SluCas9, wherein the spacer sequence is selected from any one of SEQ ID NOs: 131, 134, 135, 136, 139, 144, 148, 149, 150, 151, 179, 184, 201, 210, 223, 224, 225.
[0652] Embodiment B 44 is the method of any one of claim 34-38, or 43, comprising a nucleic acid molecule encoding SluCas9, wherein the SluCas9 comprises the amino acid sequence of SEQ ID NO: 712.
[0653] Embodiment B 45 is the method of any one of claim 34-38, or 43, comprising a nucleic acid molecule encoding SluCas9, wherein the SluCas9 is a variant of the amino acid sequence of SEQ ID NO: 712.
[0654] Embodiment B 46 is the method of any one of claim 34-38, or 43, comprising a nucleic acid molecule encoding SluCas9, wherein the SluCas9 comprises an amino acid sequence selected from any one of SEQ ID NOs: 718-720.
[0655] Embodiment B 47 is a method of excising a portion of an exon with a premature stop codon in a subject with Duchenne Muscular Dystrophy (DMD), the method comprising delivering to a cell a single nucleic acid molecule comprising:
   [0656] i) a nucleic acid encoding a pair of guide RNAs wherein the first guide RNA binds to a target sequence within the exon that is upstream of the premature stop codon, and wherein the second guide RNA binds to a sequence that is downstream of the premature stop codon and downstream of the sequence bound by the first guide RNA; and
   [0657] ii) a nucleic acid encoding a Staphylococcus aureus Cas9 (SaCas9);
      wherein the pair of guide RNAs and SaCas9 excise a portion of the exon.
[0658] Embodiment B 48 is a method of excising a portion of an exon with a premature stop codon in a subject with Duchenne Muscular Dystrophy (DMD), the method comprising delivering to a cell a single nucleic acid molecule comprising:
   [0659] i) a nucleic acid encoding a pair of guide RNAs wherein the first guide RNA binds to a target sequence within the exon that is upstream of the premature stop codon, and wherein the second guide RNA binds to a sequence that is downstream of the premature stop codon and downstream of the sequence bound by the first guide RNA; and
   [0660] ii) a nucleic acid encoding a Staphylococcus lugdunensis (SluCas9);
      wherein the pair of guide RNAs and SaCas9 excise a portion of the exon.
[0661] Embodiment B 49 is the method of any one of claims 47-48, wherein the single nucleic acid molecule is delivered to the cell on a single vector.
[0662] Embodiment B 50 is the method of any one of claims 47-49, wherein the portions of the exon remaining after excision are rejoined with a one nucleotide insertion.
[0663] Embodiment B 51 is the method of any one of claims 47-49, wherein the portions of the exon remaining after excision are rejoined without a nucleotide insertion.
[0664] Embodiment B 52 is the method of claim 51, wherein the size of excised portion of the exon is between 8 and 167 nucleotides.
[0665] Embodiment B 53 is the method of any one of claims 47-52, wherein the exon is exon 45.
[0666] Embodiment B 54 is the method of any one of claims 47, and 49-53, wherein the pair of guide RNA comprise a first and second spacer sequence selected from any one of SEQ ID NOs: 10 and 15; 10 and 16; 12 and 16; 1001 and 1005; 1001 and 15; 1001 and 16; 1003 and 1005; 16 and 1003; 12 and 1010; 12 and 1012; 12 and 1013; 10 and 1016; 1017 and 1005; 1017 and 16; 1018 and 16; 15 and 10; 16 and 10; 16 and 12; 1005 and 1001; 15 and 1001; 16 and 1001; 1005 and 1003; 1003 and 16; 1010 and 12; 1012 and 12; 1013 and 12; 1016 and 10; 1005 and 1017; 16 and 1017; and 16 and 1018.
[0667] Embodiment B 55 is the method of any one of claims 48-53, wherein the pair of guide RNA comprise a first and second spacer sequence selected from any one of SEQ ID NOs: 148 and 134; 149 and 135; 150 and 135; 131 and 136; 151 and 136; 139 and 131; 139 and 151; 140 and 131; 140 and 151; 141 and 148; 144 and 149; 144 and 150; 145 and 131; 145 and 151; 146 and 148; 134 and 148; 135 and 149; 135 and 150; 136 and 131; 136 and 151; 131 and 139; 151 and 139; 131 and 140; 151 and 140; 148 and 141; 149 and 144; 150 and 144; 131 and 145; 151 and 145; and 148 and 146.
[0668] Embodiment B 56 is the method of any one of claims 34, 36, 38-39, 47, and 49-54, wherein the SaCas9 comprises the amino acid sequence of SEQ ID NO: 715.
[0669] Embodiment B 57 is the composition or method of any one of the preceding claims, wherein the single nucleic acid molecule is an AAV vector, wherein the vector comprises from 5′ to 3′ with respect to the plus strand: the reverse complement of a first sgRNA scaffold sequence, the reverse complement of a nucleic acid encoding a first sgRNA guide sequence, the reverse complement of a promoter for expression of the nucleic acid encoding the first sgRNA, a promoter for expression of a nucleic acid encoding SaCas9 (e.g., CK8e), a nucleic acid encoding a SaCas9, a polyadenylation sequence, a promoter for expression of a second sgRNA in the same direction as the promoter for SaCas9, a second sgRNA guide sequence, and a second sgRNA scaffold sequence.
[0670] Embodiment B 58 is the composition or method of claim 57, wherein the promoter for expression of the nucleic acid encoding the first sgRNA guide sequence is an hU6 promoter.
[0671] Embodiment B 59 is the composition or method of any one of claims 57-58, wherein the promoter for expression of the nucleic acid encoding the second sgRNA guide sequence is an hU6 promoter.
[0672] Embodiment B 60 is the composition or method of claim 57, wherein the promoter for expression of the nucleic acid encoding the first sgRNA guide sequence is an 7SK promoter.
[0673] Embodiment B 61 is the composition or method of any one of claim 57-58, or 60, wherein the promoter for expression of the nucleic acid encoding the second sgRNA guide sequence is an 7SK promoter.
[0674] Embodiment B 62 is the composition or method of any one of claim 57-58, or 60, wherein the promoter for expression of the nucleic acid encoding the second sgRNA guide sequence is an H1m promoter.
[0675] Embodiment B 63 is the composition or method of any one of the preceding claims wherein the nucleic acid sequence encoding SaCas9 or SluCas9 is fused to a nucleic acid sequence encoding one or more nuclear localization sequences (NLSs).
[0676] Embodiment B 64 is the composition or method of any one of the preceding claims wherein the nucleic acid sequence encoding SaCas9 or SluCas9 is fused to a nucleic acid sequence encoding a nuclear localization sequence (NLS).
[0677] Embodiment B 65 is the composition or method of any one of the preceding claims wherein the nucleic acid sequence encoding SaCas9 or SluCas9 is fused to two nucleic acid sequences each encoding a nuclear localization sequence (NLS).
[0678] Embodiment B 66 is the composition or method of any one of the preceding claims wherein the nucleic acid sequence encoding SaCas9 or SluCas9 is fused to three nucleic acid sequences each encoding a nuclear localization sequence (NLS).
[0679] Embodiment B 67 is the composition or method of any one of claims 64-66, wherein the one or more NLSs is an SV40 NLS.
[0680] Embodiment B 68 is the composition or method of any one of claims 64-66, wherein the one or more NLSs is an c-Myc NLS.

### EXAMPLES

[0681] The following examples are provided to illustrate certain disclosed embodiments and are not to be construed as limiting the scope of this disclosure in any way.

### Example 1: Exemplary DMD sgRNAs

[0682] Guide RNA comprising the guide sequences shown in Table 1A and Table 1B below are prepared according to standard methods in a single guide (sgRNA) format. A single AAV vector is prepared that expresses one or more of the guide RNAs and a SaCas9 (for guide sequences having SEQ ID NOs: 1-35, or SEQ ID NOs: 3000-3069) or SluCas9 (for guide sequences having SEQ ID NOs: 100-225, or SEQ ID NOs: 4000-4251). See, Table 1A and Table 1B. The AAV vector is administered to cells in vitro and to mice (e.g., mdx mice) in vivo to assess the ability of the AAV to express the guide RNA and Cas9, edit the targeted exon (see Table 1A and Table 1B), and thereby treat DMD.

[0683] In particular, the ability of in vivo single AAV-mediated delivery of gene-editing components to successfully remove the mutant genomic sequence by exon skipping in the cardiac and skeletal muscle cells of mdx mice is tested.

TABLE 1A
Exemplary DMD guide sequences (human-hg38.p12)

| Sequence | | | | | |
|---|---|---|---|---|---|
| ID No. | | | | | |
| of Guide | | | | | |
| Sequence | EXON | CAS9 | strand | Guide sequence | pam |
| 1 | EXON43 | SACAS9 | + | GCAATGCTGCTGTCTTCTTGCT | ATGAAT |
| 2 | EXON43 | SACAS9 | - | AACAAAATGTACAAGGACCGAC | AAGGGT |
| 3 | EXON43 | SACAS9 | - | TGCAAAGTGCAACGCCTGTGGA | AAGGGT |
| 4 | EXON43 | SACAS9 | - | ATAGTCTACAACAAAGCTCAGG | TCGGAT |
| 5 | EXON43 | SACAS9 | - | CTGTTTTAAAATTTTTATATTA | CAGAAT |
| 6 | EXON44 | SACAS9 | + | ATTTAGCATGTTCCCAATTCTC | AGGAAT |
| 7 | EXON44 | SACAS9 | + | AATCGCCTGCAGGTAAAAGCAT | ATGGAT |
| 8 | EXON44 | SACAS9 | - | TCTCAGAAAGACACAAATTCCT | GAGAAT |
| 9 | EXON45 | SACAS9 | + | TCAGGCTTCCCAATTTTTCCTG | TAGAAT |
| 10 | EXON45 | SACAS9 | + | TAGAATACTGGCATCTGTTTTT | GAGGAT |
| 11 | EXON45 | SACAS9 | + | TGGCATCTGTTTTTGAGGATTG | CTGAAT |
| 12 | EXON45 | SACAS9 | + | TTGCCGCTGCCCAATGCCATCC | TGGAGT |
| 13 | EXON45 | SACAS9 | - | GAGGTAGGGCGACAGATCTAAT | AGGAAT |
| 14 | EXON45 | SACAS9 | - | TCTACAGGAAAAATTGGGAAGC | CTGAAT |
| 15 | EXON45 | SACAS9 | - | GCGGCAAACTGTTGTCAGAACA | TTGAAT |
| 16 | EXON45 | SACAS9 | - | TTTTGGTATCTTACAGGAACTC | CAGGAT |
| 17 | EXON50 | SACAS9 | - | ACTATTGGAGCCTGTAAGTATA | CTGGAT |
| 18 | EXON50 | SACAS9 | - | AGGAAGTTAGAAGATCTGAGCT | CTGAGT |
| 19 | EXON51 | SACAS9 | + | TAGTAACCACAGGTTGTGTCAC | CAGAGT |
| 20 | EXON51 | SACAS9 | + | GTTGTGTCACCAGAGTAACAGT | CTGAGT |
| 21 | EXON51 | SACAS9 | + | TCTGAGTAGGAGCTAAAATATT | TTGGGT |
| 22 | EXON51 | SACAS9 | - | GAGGGTGATGGTGGGTGACCTT | GAGGAT |
| 23 | EXON51 | SACAS9 | - | TATAAAATCACAGAGGGTGATG | GTGGGT |
| 24 | EXON51 | SACAS9 | - | TTGATCAAGTTATAAAATCACA | GAGGGT |
| 25 | EXON53 | SACAS9 | + | CCTTGGTTTCTGTGATTTTCTT | TTGGAT |
| 26 | EXON53 | SACAS9 | + | TCCTTAGCTTCCAGCCATTGTG | TTGAAT |
| 27 | EXON53 | SACAS9 | + | CTTGTACTTCATCCCACTGATT | CTGAAT |
| 28 | EXON53 | SACAS9 | + | ACTGATTCTGAATTCTTTCAAC | TAGAAT |
| 29 | EXON53 | SACAS9 | - | AGCCAAGCTTGAGTCATGGAAG | GAGGGT |
| 30 | EXON53 | SACAS9 | - | TTAGGACAGGCCAGAGCCAAGC | TTGAGT |
| 31 | EXON53 | SACAS9 | - | GCAACAGTTGAATGAAATGTTA | AAGGAT |
| 32 | EXON53 | SACAS9 | - | CCTTCAGAACCGGAGGCAACAG | TTGAAT |
| 33 | EXON53 | SACAS9 | - | AGTTGAAAGAATTCAGAATCAG | TGGGAT |
| 34 | EXON53 | SACAS9 | - | TTTTATTCTAGTTGAAAGAATT | CAGAAT |
| 35 | EXON53 | SACAS9 | - | TTTTTCCTTTTATTCTAGTTGA | AAGAAT |
| 100 | EXON43 | SLUCAS9 | + | ATATATGTGTTACCTACCCTTG | TCGG |
| 101 | EXON43 | SLUCAS9 | + | ACATTTTGTTAACTTTTTCCCA | TTGG |
| 102 | EXON43 | SLUCAS9 | + | CTTTTTCCCATTGGAAATCAAG | CTGG |
| 103 | EXON43 | SLUCAS9 | + | TTTTTCCCATTGGAAATCAAGC | TGGG |
| 104 | EXON43 | SLUCAS9 | + | TCCTGTAGCTTCACCCTTTCCA | CAGG |
| 105 | EXON43 | SLUCAS9 | - | AATGTACAAGGACCGACAAGGG | TAGG |
| 106 | EXON43 | SLUCAS9 | - | ACAAAATGTACAAGGACCGACA | AGGG |
| 107 | EXON43 | SLUCAS9 | - | AACAAAATGTACAAGGACCGAC | AAGG |
| 108 | EXON43 | SLUCAS9 | - | GGAAAAAGTTAACAAAATGTAC | AAGG |
| 109 | EXON43 | SLUCAS9 | - | TCTCTCCCAGCTTGATTTCCAA | TGGG |
| 110 | EXON43 | SLUCAS9 | - | CTCTCTCCCAGCTTGATTTCCA | ATGG |
| 111 | EXON43 | SLUCAS9 | - | GCCTGTGGAAAGGGTGAAGCTA | CAGG |
| 112 | EXON43 | SLUCAS9 | - | GCAAAGTGCAACGCCTGTGGAA | AGGG |
| 113 | EXON43 | SLUCAS9 | - | TGCAAAGTGCAACGCCTGTGGA | AAGG |
| 114 | EXON43 | SLUCAS9 | - | AGCATTGCAAAGTGCAACGCCT | GTGG |
| 115 | EXON43 | SLUCAS9 | - | ATAGTCTACAACAAAGCTCAGG | TCGG |
| 116 | EXON43 | SLUCAS9 | - | AAAGATAGTCTACAACAAAGCT | CAGG |
| 117 | EXON44 | SLUCAS9 | + | TATTTAGCATGTTCCCAATTCT | CAGG |
| 118 | EXON44 | SLUCAS9 | + | AACAGATCTGTCAAATCGCCTG | CAGG |
| 119 | EXON44 | SLUCAS9 | + | AATCGCCTGCAGGTAAAAGCAT | ATGG |
| 120 | EXON44 | SLUCAS9 | - | TGCTAAATACAAATGGTATCTT | AAGG |
| 121 | EXON44 | SLUCAS9 | - | ATTGGGAACATGCTAAATACAA | ATGG |
| 122 | EXON44 | SLUCAS9 | - | AAAGACACAAATTCCTGAGAAT | TGGG |
| 123 | EXON44 | SLUCAS9 | - | GAAAGACACAAATTCCTGAGAA | TTGG |
| 124 | EXON44 | SLUCAS9 | - | ATGATATAAAGATATTTAATCA | GTGG |
| 125 | EXON44 | SLUCAS9 | - | TTGACAGATCTGTTGAGAAATG | GCGG |
| 126 | EXON44 | SLUCAS9 | - | GATTTGACAGATCTGTTGAGAA | ATGG |
| 127 | EXON44 | SLUCAS9 | - | TTGATCCATATGCTTTTACCTG | CAGG |
| 128 | EXON45 | SLUCAS9 | + | AGACCTCCTGCCACCGCAGATT | CAGG |
| 129 | EXON45 | SLUCAS9 | + | TCCCAATTTTTCCTGTAGAATA | CTGG |
| 130 | EXON45 | SLUCAS9 | + | TAGAATACTGGCATCTGTTTTT | GAGG |
| 131 | EXON45 | SLUCAS9 | + | TTTGCCGCTGCCCAATGCCATC | CTGG |
| 132 | EXON45 | SLUCAS9 | + | GGAGTTCCTGTAAGATACCAAA | AAGG |
| 133 | EXON45 | SLUCAS9 | - | AGAGGTAGGGCGACAGATCTAA | TAGG |
| 134 | EXON45 | SLUCAS9 | - | CTGTCAGACAGAAAAAAGAGGT | AGGG |
| 135 | EXON45 | SLUCAS9 | - | GCTGTCAGACAGAAAAAAGAGG | TAGG |
| 136 | EXON45 | SLUCAS9 | - | AACAGCTGTCAGACAGAAAAAA | GAGG |
| 137 | EXON45 | SLUCAS9 | - | AAGCCTGAATCTGCGGTGGCAG | GAGG |
| 138 | EXON45 | SLUCAS9 | - | GGGAAGCCTGAATCTGCGGTGG | CAGG |
| 139 | EXON45 | SLUCAS9 | - | AATTGGGAAGCCTGAATCTGCG | GTGG |
| 140 | EXON45 | SLUCAS9 | - | AAAAATTGGGAAGCCTGAATCT | GCGG |
| 141 | EXON45 | SLUCAS9 | - | GCCAGTATTCTACAGGAAAAAT | TGGG |
| 142 | EXON45 | SLUCAS9 | - | TGCCAGTATTCTACAGGAAAAA | TTGG |
| 143 | EXON45 | SLUCAS9 | - | AAAAACAGATGCCAGTATTCTA | CAGG |
| 144 | EXON45 | SLUCAS9 | - | TGTCAGAACATTGAATGCAACT | GGGG |
| 145 | EXON45 | SLUCAS9 | - | TTGTCAGAACATTGAATGCAAC | TGGG |
| 146 | EXON45 | SLUCAS9 | - | GTTGTCAGAACATTGAATGCAA | CTGG |
| 147 | EXON45 | SLUCAS9 | - | AACTCCAGGATGGCATTGGGCA | GCGG |
| 148 | EXON45 | SLUCAS9 | - | TACAGGAACTCCAGGATGGCAT | TGGG |
| 149 | EXON45 | SLUCAS9 | - | TTACAGGAACTCCAGGATGGCA | TTGG |
| 150 | EXON45 | SLUCAS9 | - | GGTATCTTACAGGAACTCCAGG | ATGG |
| 151 | EXON45 | SLUCAS9 | - | TTTTGGTATCTTACAGGAACTC | CAGG |
| 152 | EXON45 | SLUCAS9 | - | GTTTTGCCTTTTTGGTATCTTA | CAGG |
| 153 | EXON45 | SLUCAS9 | - | TCTTTTCTCAAATAAAAAGACA | TGGG |
| 154 | EXON50 | SLUCAS9 | + | AGAATGGGATCCAGTATACTTA | CAGG |
| 155 | EXON50 | SLUCAS9 | + | AGTATACTTACAGGCTCCAATA | GTGG |
| 156 | EXON50 | SLUCAS9 | + | CAGGCTCCAATAGTGGTCAGTC | CAGG |
| 157 | EXON50 | SLUCAS9 | + | CAATAGTGGTCAGTCCAGGAGC | TAGG |
| 158 | EXON50 | SLUCAS9 | + | GTGGTCAGTCCAGGAGCTAGGT | CAGG |
| 159 | EXON50 | SLUCAS9 | + | TTGCCCTCAGCTCTTGAAGTAA | ACGG |
| 160 | EXON50 | SLUCAS9 | - | AGTATACTGGATCCCATTCTCT | TTGG |
| 161 | EXON50 | SLUCAS9 | - | ACTATTGGAGCCTGTAAGTATA | CTGG |
| 162 | EXON50 | SLUCAS9 | - | CTAGCTCCTGGACTGACCACTA | TTGG |
| 163 | EXON50 | SLUCAS9 | - | GCAAAGCAGCCTGACCTAGCTC | CTGG |
| 164 | EXON50 | SLUCAS9 | - | AAACCGTTTACTTCAAGAGCTG | AGGG |
| 165 | EXON50 | SLUCAS9 | - | TAAACCGTTTACTTCAAGAGCT | GAGG |
| 166 | EXON50 | SLUCAS9 | - | AGATCTGAGCTCTGAGTGGAAG | GCGG |
| 167 | EXON50 | SLUCAS9 | - | AGAAGATCTGAGCTCTGAGTGG | AAGG |
| 168 | EXON50 | SLUCAS9 | - | AGTTAGAAGATCTGAGCTCTGA | GTGG |
| 169 | EXON50 | SLUCAS9 | - | ATGTGTATGCTTTTCTGTTAAA | GAGG |
| 170 | EXON51 | SLUCAS9 | + | TGATCATCTCGTTGATATCCTC | AAGG |
| 171 | EXON51 | SLUCAS9 | + | TTGATCAAGCAGAGAAAGCCAG | TCGG |
| 172 | EXON51 | SLUCAS9 | + | AGTCGGTAAGTTCTGTCCAAGC | CCGG |
| 173 | EXON51 | SLUCAS9 | + | GCCCGGTTGAAATCTGCCAGAG | CAGG |
| 174 | EXON51 | SLUCAS9 | + | CAGAGCAGGTACCTCCAACATC | AAGG |
| 175 | EXON51 | SLUCAS9 | + | GGTACCTCCAACATCAAGGAAG | ATGG |
| 176 | EXON51 | SLUCAS9 | + | CAAGGAAGATGGCATTTCTAGT | TTGG |
| 177 | EXON51 | SLUCAS9 | + | AGATGGCATTTCTAGTTTGGAG | ATGG |
| 178 | EXON51 | SLUCAS9 | + | ATGGCAGTTTCCTTAGTAACCA | CAGG |
| 179 | EXON51 | SLUCAS9 | + | GTCACCAGAGTAACAGTCTGAG | TAGG |
| 180 | EXON51 | SLUCAS9 | + | TCTGAGTAGGAGCTAAAATATT | TTGG |
| 181 | EXON51 | SLUCAS9 | + | CTGAGTAGGAGCTAAAATATTT | TGGG |
| 182 | EXON51 | SLUCAS9 | + | AAATATTTTGGGTTTTTGCAAA | AAGG |
| 183 | EXON51 | SLUCAS9 | - | GTATGAGAAAAAATGATAAAAG | TTGG |
| 184 | EXON51 | SLUCAS9 | - | CAACGAGATGATCATCAAGCAG | AAGG |
| 185 | EXON51 | SLUCAS9 | - | GAGGGTGATGGTGGGTGACCTT | GAGG |
| 186 | EXON51 | SLUCAS9 | - | ATAAAATCACAGAGGGTGATGG | TGGG |
| 187 | EXON51 | SLUCAS9 | - | TATAAAATCACAGAGGGTGATG | GTGG |
| 188 | EXON51 | SLUCAS9 | - | AGTTATAAAATCACAGAGGGTG | ATGG |
| 189 | EXON51 | SLUCAS9 | - | TGATCAAGTTATAAAATCACAG | AGGG |
| 190 | EXON51 | SLUCAS9 | - | TTGATCAAGTTATAAAATCACA | GAGG |
| 191 | EXON51 | SLUCAS9 | - | GGGCTTGGACAGAACTTACCGA | CTGG |
| 192 | EXON51 | SLUCAS9 | - | CTCTGGCAGATTTCAACCGGGC | TTGG |
| 193 | EXON51 | SLUCAS9 | - | ACCTGCTCTGGCAGATTTCAAC | CGGG |
| 194 | EXON51 | SLUCAS9 | - | TACCTGCTCTGGCAGATTTCAA | CCGG |
| 195 | EXON51 | SLUCAS9 | - | CTTGATGTTGGAGGTACCTGCT | CTGG |
| 196 | EXON51 | SLUCAS9 | - | AATGCCATCTTCCTTGATGTTG | GAGG |
| 197 | EXON51 | SLUCAS9 | - | AGAAATGCCATCTTCCTTGATG | TTGG |
| 198 | EXON51 | SLUCAS9 | - | GGTGACACAACCTGTGGTTACT | AAGG |
| 199 | EXON51 | SLUCAS9 | - | TGTTACTCTGGTGACACAACCT | GTGG |
| 200 | EXON51 | SLUCAS9 | - | AGCTCCTACTCAGACTGTTACT | CTGG |
| 201 | EXON53 | SLUCAS9 | + | AAAGGTATCTTTGATACTAACC | TTGG |
| 202 | EXON53 | SLUCAS9 | + | CCTTGGTTTCTGTGATTTTCTT | TTGG |
| 203 | EXON53 | SLUCAS9 | + | CTTTTGGATTGCATCTACTGTA | TAGG |
| 204 | EXON53 | SLUCAS9 | + | TTTTGGATTGCATCTACTGTAT | AGGG |
| 205 | EXON53 | SLUCAS9 | + | ACCCTCCTTCCATGACTCAAGC | TTGG |
| 206 | EXON53 | SLUCAS9 | + | CTTCCATGACTCAAGCTTGGCT | CTGG |
| 207 | EXON53 | SLUCAS9 | + | ACATTTCATTCAACTGTTGCCT | CCGG |
| 208 | EXON53 | SLUCAS9 | + | TCAACTGTTGCCTCCGGTTCTG | AAGG |
| 209 | EXON53 | SLUCAS9 | + | TGAATTCTTTCAACTAGAATAA | AAGG |
| 210 | EXON53 | SLUCAS9 | - | CCAAAAGAAAATCACAGAAACC | AAGG |
| 211 | EXON53 | SLUCAS9 | - | GCCAAGCTTGAGTCATGGAAGG | AGGG |
| 212 | EXON53 | SLUCAS9 | - | AGCCAAGCTTGAGTCATGGAAG | GAGG |
| 213 | EXON53 | SLUCAS9 | - | CAGAGCCAAGCTTGAGTCATGG | AAGG |
| 214 | EXON53 | SLUCAS9 | - | AGGCCAGAGCCAAGCTTGAGTC | ATGG |
| 215 | EXON53 | SLUCAS9 | - | AGAAGCTGAGCAGGTCTTAGGA | CAGG |
| 216 | EXON53 | SLUCAS9 | - | AAGGAAGAAGCTGAGCAGGTCT | TAGG |
| 217 | EXON53 | SLUCAS9 | - | GGAAGCTAAGGAAGAAGCTGAG | CAGG |
| 218 | EXON53 | SLUCAS9 | - | TTCAACACAATGGCTGGAAGCT | AAGG |
| 219 | EXON53 | SLUCAS9 | - | GTTAAAGGATTCAACACAATGG | CTGG |
| 220 | EXON53 | SLUCAS9 | - | AAATGTTAAAGGATTCAACACA | ATGG |
| 221 | EXON53 | SLUCAS9 | - | GCAACAGTTGAATGAAATGTTA | AAGG |
| 222 | EXON53 | SLUCAS9 | - | TACAAGAACACCTTCAGAACCG | GAGG |
| 223 | EXON53 | SLUCAS9 | - | AAGTACAAGAACACCTTCAGAA | CCGG |
| 224 | EXON53 | SLUCAS9 | - | AGTTGAAAGAATTCAGAATCAG | TGGG |
| 225 | EXON53 | SLUCAS9 | - | TAGTTGAAAGAATTCAGAATCA | GTGG |

TABLE 1B
Exemplary DMD guide sequences
(20-nucleotides and 21-nucleotides)

| Se- | | | | |
|---|---|---|---|---|
| quence | | | | |
| ID No. | | | | |
| of | | | | |
| Guide | | | | |
| Se- | | | | |
| quence | EXON | CAS9 | Strand | Guide sequence |
| 3000 | EXON43 | SACAS9 | + | AATGCTGCTGTCTTCTTGCT |
| 3001 | EXON43 | SACAS9 | + | CAATGCTGCTGTCTTCTTGCT |
| 1 | EXON43 | SACAS9 | + | GCAATGCTGCTGTCTTCTTGCT |
| 3002 | EXON43 | SACAS9 | − | AACAAAATGTACAAGGACCG |
| 3003 | EXON43 | SACAS9 | − | AACAAAATGTACAAGGACCGA |
| 2 | EXON43 | SACAS9 | − | AACAAAATGTACAAGGACCGAC |
| 3004 | EXON43 | SACAS9 | − | TGCAAAGTGCAACGCCTGTG |
| 3005 | EXON43 | SACAS9 | − | TGCAAAGTGCAACGCCTGTGG |
| 3 | EXON43 | SACAS9 | − | TGCAAAGTGCAACGCCTGTGGA |
| 3006 | EXON43 | SACAS9 | − | ATAGTCTACAACAAAGCTCA |
| 3007 | EXON43 | SACAS9 | − | ATAGTCTACAACAAAGCTCAG |
| 4 | EXON43 | SACAS9 | − | ATAGTCTACAACAAAGCTCAGG |
| 3008 | EXON43 | SACAS9 | − | CTGTTTTAAAATTTTTATAT |
| 3009 | EXON43 | SACAS9 | − | CTGTTTTAAAATTTTTATATT |
| 5 | EXON43 | SACAS9 | − | CTGTTTTAAAATTTTTATATTA |
| 3010 | EXON44 | SACAS9 | + | TTAGCATGTTCCCAATTCTC |
| 3011 | EXON44 | SACAS9 | + | TTTAGCATGTTCCCAATTCTC |
| 6 | EXON44 | SACAS9 | + | ATTTAGCATGTTCCCAATTCTC |
| 3012 | EXON44 | SACAS9 | + | TCGCCTGCAGGTAAAAGCAT |
| 3013 | EXON44 | SACAS9 | + | ATCGCCTGCAGGTAAAAGCAT |
| 7 | EXON44 | SACAS9 | + | AATCGCCTGCAGGTAAAAGCAT |
| 3014 | EXON44 | SACAS9 | − | TCTCAGAAAGACACAAATTC |
| 3015 | EXON44 | SACAS9 | − | TCTCAGAAAGACACAAATTCC |
| 8 | EXON44 | SACAS9 | − | TCTCAGAAAGACACAAATTCCT |
| 3016 | EXON45 | SACAS9 | + | AGGCTTCCCAATTTTTCCTG |
| 3017 | EXON45 | SACAS9 | + | CAGGCTTCCCAATTTTTCCTG |
| 9 | EXON45 | SACAS9 | + | TCAGGCTTCCCAATTTTTCCTG |
| 3018 | EXON45 | SACAS9 | + | GAATACTGGCATCTGTTTTT |
| 3019 | EXON45 | SACAS9 | + | AGAATACTGGCATCTGTTTTT |
| 10 | EXON45 | SACAS9 | + | TAGAATACTGGCATCTGTTTTT |
| 3020 | EXON45 | SACAS9 | + | GCATCTGTTTTTGAGGATTG |
| 3021 | EXON45 | SACAS9 | + | GGCATCTGTTTTTGAGGATTG |
| 11 | EXON45 | SACAS9 | + | TGGCATCTGTTTTTGAGGATTG |
| 3022 | EXON45 | SACAS9 | + | GCCGCTGCCCAATGCCATCC |
| 3023 | EXON45 | SACAS9 | + | TGCCGCTGCCCAATGCCATCC |
| 12 | EXON45 | SACAS9 | + | TTGCCGCTGCCCAATGCCATCC |
| 3024 | EXON45 | SACAS9 | − | GAGGTAGGGCGACAGATCTA |
| 3025 | EXON45 | SACAS9 | − | GAGGTAGGGCGACAGATCTAA |
| 13 | EXON45 | SACAS9 | − | GAGGTAGGGCGACAGATCTAAT |
| 3026 | EXON45 | SACAS9 | − | TCTACAGGAAAAATTGGGAA |
| 3027 | EXON45 | SACAS9 | − | TCTACAGGAAAAATTGGGAAG |
| 14 | EXON45 | SACAS9 | − | TCTACAGGAAAAATTGGGAAGC |
| 3028 | EXON45 | SACAS9 | − | GCGGCAAACTGTTGTCAGAA |
| 3029 | EXON45 | SACAS9 | − | GCGGCAAACTGTTGTCAGAAC |
| 15 | EXON45 | SACAS9 | − | GCGGCAAACTGTTGTCAGAACA |
| 3030 | EXON45 | SACAS9 | − | TTTTGGTATCTTACAGGAAC |
| 3031 | EXON45 | SACAS9 | − | TTTTGGTATCTTACAGGAACT |
| 16 | EXON45 | SACAS9 | − | TTTTGGTATCTTACAGGAACTC |
| 3032 | EXON50 | SACAS9 | − | ACTATTGGAGCCTGTAAGTA |
| 3033 | EXON50 | SACAS9 | − | ACTATTGGAGCCTGTAAGTAT |
| 17 | EXON50 | SACAS9 | − | ACTATTGGAGCCTGTAAGTATA |
| 3034 | EXON50 | SACAS9 | − | AGGAAGTTAGAAGATCTGAG |
| 3035 | EXON50 | SACAS9 | − | AGGAAGTTAGAAGATCTGAGC |
| 18 | EXON50 | SACAS9 | − | AGGAAGTTAGAAGATCTGAGCT |
| 3036 | EXON51 | SACAS9 | + | GTAACCACAGGTTGTGTCAC |
| 3037 | EXON51 | SACAS9 | + | AGTAACCACAGGTTGTGTCAC |
| 19 | EXON51 | SACAS9 | + | TAGTAACCACAGGTTGTGTCAC |
| 3038 | EXON51 | SACAS9 | + | TGTGTCACCAGAGTAACAGT |
| 3039 | EXON51 | SACAS9 | + | TTGTGTCACCAGAGTAACAGT |
| 20 | EXON51 | SACAS9 | + | GTTGTGTCACCAGAGTAACAGT |
| 3040 | EXON51 | SACAS9 | + | TGAGTAGGAGCTAAAATATT |
| 3041 | EXON51 | SACAS9 | + | CTGAGTAGGAGCTAAAATATT |
| 21 | EXON51 | SACAS9 | + | TCTGAGTAGGAGCTAAAATATT |
| 3042 | EXON51 | SACAS9 | − | GAGGGTGATGGTGGGTGACC |
| 3043 | EXON51 | SACAS9 | − | GAGGGTGATGGTGGGTGACCT |
| 22 | EXON51 | SACAS9 | − | GAGGGTGATGGTGGGTGACCTT |
| 3044 | EXON51 | SACAS9 | − | TATAAAATCACAGAGGGTGA |
| 3045 | EXON51 | SACAS9 | − | TATAAAATCACAGAGGGTGAT |
| 23 | EXON51 | SACAS9 | − | TATAAAATCACAGAGGGTGATG |
| 3046 | EXON51 | SACAS9 | − | TTGATCAAGTTATAAAATCA |
| 3047 | EXON51 | SACAS9 | − | TTGATCAAGTTATAAAATCAC |
| 24 | EXON51 | SACAS9 | − | TTGATCAAGTTATAAAATCACA |
| 3048 | EXON53 | SACAS9 | + | TTGGTTTCTGTGATTTTCTT |
| 3049 | EXON53 | SACAS9 | + | CTTGGTTTCTGTGATTTTCTT |
| 25 | EXON53 | SACAS9 | + | CCTTGGTTTCTGTGATTTTCTT |
| 3050 | EXON53 | SACAS9 | + | CTTAGCTTCCAGCCATTGTG |
| 3051 | EXON53 | SACAS9 | + | CCTTAGCTTCCAGCCATTGTG |
| 26 | EXON53 | SACAS9 | + | TCCTTAGCTTCCAGCCATTGTG |
| 3052 | EXON53 | SACAS9 | + | TGTACTTCATCCCACTGATT |
| 3053 | EXON53 | SACAS9 | + | TTGTACTTCATCCCACTGATT |
| 27 | EXON53 | SACAS9 | + | CTTGTACTTCATCCCACTGATT |
| 3054 | EXON53 | SACAS9 | + | TGATTCTGAATTCTTTCAAC |
| 3055 | EXON53 | SACAS9 | + | CTGATTCTGAATTCTTTCAAC |
| 28 | EXON53 | SACAS9 | + | ACTGATTCTGAATTCTTTCAAC |
| 3056 | EXON53 | SACAS9 | − | AGCCAAGCTTGAGTCATGGA |
| 3057 | EXON53 | SACAS9 | − | AGCCAAGCTTGAGTCATGGAA |
| 29 | EXON53 | SACAS9 | − | AGCCAAGCTTGAGTCATGGAAG |
| 3058 | EXON53 | SACAS9 | − | TTAGGACAGGCCAGAGCCAA |
| 3059 | EXON53 | SACAS9 | − | TTAGGACAGGCCAGAGCCAAG |
| 30 | EXON53 | SACAS9 | − | TTAGGACAGGCCAGAGCCAAGC |
| 3060 | EXON53 | SACAS9 | − | GCAACAGTTGAATGAAATGT |
| 3061 | EXON53 | SACAS9 | − | GCAACAGTTGAATGAAATGTT |
| 31 | EXON53 | SACAS9 | − | GCAACAGTTGAATGAAATGTTA |
| 3062 | EXON53 | SACAS9 | − | CCTTCAGAACCGGAGGCAAC |
| 3063 | EXON53 | SACAS9 | − | CCTTCAGAACCGGAGGCAACA |
| 32 | EXON53 | SACAS9 | − | CCTTCAGAACCGGAGGCAACAG |
| 3064 | EXON53 | SACAS9 | − | AGTTGAAAGAATTCAGAATC |
| 3065 | EXON53 | SACAS9 | − | AGTTGAAAGAATTCAGAATCA |
| 33 | EXON53 | SACAS9 | − | AGTTGAAAGAATTCAGAATCAG |
| 3066 | EXON53 | SACAS9 | − | TTTTATTCTAGTTGAAAGAA |
| 3067 | EXON53 | SACAS9 | − | TTTTATTCTAGTTGAAAGAAT |
| 34 | EXON53 | SACAS9 | − | TTTTATTCTAGTTGAAAGAATT |
| 3068 | EXON53 | SACAS9 | − | TTTTTCCTTTTATTCTAGTT |
| 3069 | EXON53 | SACAS9 | − | TTTTTCCTTTTATTCTAGTTG |
| 35 | EXON53 | SACAS9 | − | TTTTTCCTTTTATTCTAGTTGA |
| 4000 | EXON43 | SLUCAS9 | + | ATATGTGTTACCTACCCTTG |
| 4001 | EXON43 | SLUCAS9 | + | TATATGTGTTACCTACCCTTG |
| 100 | EXON43 | SLUCAS9 | + | ATATATGTGTTACCTACCCTTG |
| 4002 | EXON43 | SLUCAS9 | + | ATTTTGTTAACTTTTTCCCA |
| 4003 | EXON43 | SLUCAS9 | + | CATTTTGTTAACTTTTTCCCA |
| 101 | EXON43 | SLUCAS9 | + | ACATTTTGTTAACTTTTTCCCA |
| 4004 | EXON43 | SLUCAS9 | + | TTTTCCCATTGGAAATCAAG |
| 4005 | EXON43 | SLUCAS9 | + | TTTTTCCCATTGGAAATCAAG |
| 102 | EXON43 | SLUCAS9 | + | CTTTTTCCCATTGGAAATCAAG |
| 4006 | EXON43 | SLUCAS9 | + | TTTCCCATTGGAAATCAAGC |
| 4007 | EXON43 | SLUCAS9 | + | TTTTCCCATTGGAAATCAAGC |
| 103 | EXON43 | SLUCAS9 | + | TTTTTCCCATTGGAAATCAAGC |
| 4008 | EXON43 | SLUCAS9 | + | CTGTAGCTTCACCCTTTCCA |
| 4009 | EXON43 | SLUCAS9 | + | CCTGTAGCTTCACCCTTTCCA |
| 104 | EXON43 | SLUCAS9 | + | TCCTGTAGCTTCACCCTTTCCA |
| 4010 | EXON43 | SLUCAS9 | − | AATGTACAAGGACCGACAAG |
| 4011 | EXON43 | SLUCAS9 | − | AATGTACAAGGACCGACAAGG |
| 105 | EXON43 | SLUCAS9 | − | AATGTACAAGGACCGACAAGGG |
| 4012 | EXON43 | SLUCAS9 | − | ACAAAATGTACAAGGACCGA |
| 4013 | EXON43 | SLUCAS9 | − | ACAAAATGTACAAGGACCGAC |
| 106 | EXON43 | SLUCAS9 | − | ACAAAATGTACAAGGACCGACA |
| 4014 | EXON43 | SLUCAS9 | − | AACAAAATGTACAAGGACCG |
| 4015 | EXON43 | SLUCAS9 | − | AACAAAATGTACAAGGACCGA |
| 107 | EXON43 | SLUCAS9 | − | AACAAAATGTACAAGGACCGAC |
| 4016 | EXON43 | SLUCAS9 | − | GGAAAAAGTTAACAAAATGT |
| 4017 | EXON43 | SLUCAS9 | − | GGAAAAAGTTAACAAAATGTA |
| 108 | EXON43 | SLUCAS9 | − | GGAAAAAGTTAACAAAATGTAC |
| 4018 | EXON43 | SLUCAS9 | − | TCTCTCCCAGCTTGATTTCC |
| 4019 | EXON43 | SLUCAS9 | − | TCTCTCCCAGCTTGATTTCCA |
| 109 | EXON43 | SLUCAS9 | − | TCTCTCCCAGCTTGATTTCCAA |
| 4020 | EXON43 | SLUCAS9 | − | CTCTCTCCCAGCTTGATTTC |
| 4021 | EXON43 | SLUCAS9 | − | CTCTCTCCCAGCTTGATTTCC |
| 110 | EXON43 | SLUCAS9 | − | CTCTCTCCCAGCTTGATTTCCA |
| 4022 | EXON43 | SLUCAS9 | − | GCCTGTGGAAAGGGTGAAGC |
| 4023 | EXON43 | SLUCAS9 | − | GCCTGTGGAAAGGGTGAAGCT |
| 111 | EXON43 | SLUCAS9 | − | GCCTGTGGAAAGGGTGAAGCTA |
| 4024 | EXON43 | SLUCAS9 | − | GCAAAGTGCAACGCCTGTGG |
| 4025 | EXON43 | SLUCAS9 | − | GCAAAGTGCAACGCCTGTGGA |
| 112 | EXON43 | SLUCAS9 | − | GCAAAGTGCAACGCCTGTGGAA |
| 4026 | EXON43 | SLUCAS9 | − | TGCAAAGTGCAACGCCTGTG |
| 4027 | EXON43 | SLUCAS9 | − | TGCAAAGTGCAACGCCTGTGG |
| 113 | EXON43 | SLUCAS9 | − | TGCAAAGTGCAACGCCTGTGGA |
| 4028 | EXON43 | SLUCAS9 | − | AGCATTGCAAAGTGCAACGC |
| 4029 | EXON43 | SLUCAS9 | − | AGCATTGCAAAGTGCAACGCC |
| 114 | EXON43 | SLUCAS9 | − | AGCATTGCAAAGTGCAACGCCT |
| 4030 | EXON43 | SLUCAS9 | − | ATAGTCTACAACAAAGCTCA |
| 4031 | EXON43 | SLUCAS9 | − | ATAGTCTACAACAAAGCTCAG |
| 115 | EXON43 | SLUCAS9 | − | ATAGTCTACAACAAAGCTCAGG |
| 4032 | EXON43 | SLUCAS9 | − | AAAGATAGTCTACAACAAAG |
| 4033 | EXON43 | SLUCAS9 | − | AAAGATAGTCTACAACAAAGC |
| 116 | EXON43 | SLUCAS9 | − | AAAGATAGTCTACAACAAAGCT |
| 4034 | EXON44 | SLUCAS9 | + | TTTAGCATGTTCCCAATTCT |
| 4035 | EXON44 | SLUCAS9 | + | ATTTAGCATGTTCCCAATTCT |
| 117 | EXON44 | SLUCAS9 | + | TATTTAGCATGTTCCCAATTCT |
| 4036 | EXON44 | SLUCAS9 | + | CAGATCTGTCAAATCGCCTG |
| 4037 | EXON44 | SLUCAS9 | + | ACAGATCTGTCAAATCGCCTG |
| 118 | EXON44 | SLUCAS9 | + | AACAGATCTGTCAAATCGCCTG |
| 4038 | EXON44 | SLUCAS9 | + | TCGCCTGCAGGTAAAAGCAT |
| 4039 | EXON44 | SLUCAS9 | + | ATCGCCTGCAGGTAAAAGCAT |
| 119 | EXON44 | SLUCAS9 | + | AATCGCCTGCAGGTAAAAGCAT |
| 4040 | EXON44 | SLUCAS9 | − | TGCTAAATACAAATGGTATC |
| 4041 | EXON44 | SLUCAS9 | − | TGCTAAATACAAATGGTATCT |
| 120 | EXON44 | SLUCAS9 | − | TGCTAAATACAAATGGTATCTT |
| 4042 | EXON44 | SLUCAS9 | − | ATTGGGAACATGCTAAATAC |
| 4043 | EXON44 | SLUCAS9 | − | ATTGGGAACATGCTAAATACA |
| 121 | EXON44 | SLUCAS9 | − | ATTGGGAACATGCTAAATACAA |
| 4044 | EXON44 | SLUCAS9 | − | AAAGACACAAATTCCTGAGA |
| 4045 | EXON44 | SLUCAS9 | − | AAAGACACAAATTCCTGAGAA |
| 122 | EXON44 | SLUCAS9 | − | AAAGACACAAATTCCTGAGAAT |
| 4046 | EXON44 | SLUCAS9 | − | GAAAGACACAAATTCCTGAG |
| 4047 | EXON44 | SLUCAS9 | − | GAAAGACACAAATTCCTGAGA |
| 123 | EXON44 | SLUCAS9 | − | GAAAGACACAAATTCCTGAGAA |
| 4048 | EXON44 | SLUCAS9 | − | ATGATATAAAGATATTTAAT |
| 4049 | EXON44 | SLUCAS9 | − | ATGATATAAAGATATTTAATC |
| 124 | EXON44 | SLUCAS9 | − | ATGATATAAAGATATTTAATCA |
| 4050 | EXON44 | SLUCAS9 | − | TTGACAGATCTGTTGAGAAA |
| 4051 | EXON44 | SLUCAS9 | − | TTGACAGATCTGTTGAGAAAT |
| 125 | EXON44 | SLUCAS9 | − | TTGACAGATCTGTTGAGAAATG |
| 4052 | EXON44 | SLUCAS9 | − | GATTTGACAGATCTGTTGAG |
| 4053 | EXON44 | SLUCAS9 | − | GATTTGACAGATCTGTTGAGA |
| 126 | EXON44 | SLUCAS9 | − | GATTTGACAGATCTGTTGAGAA |
| 4054 | EXON44 | SLUCAS9 | − | TTGATCCATATGCTTTTACC |
| 4055 | EXON44 | SLUCAS9 | − | TTGATCCATATGCTTTTACCT |
| 127 | EXON44 | SLUCAS9 | − | TTGATCCATATGCTTTTACCTG |
| 4056 | EXON45 | SLUCAS9 | + | ACCTCCTGCCACCGCAGATT |
| 4057 | EXON45 | SLUCAS9 | + | GACCTCCTGCCACCGCAGATT |
| 128 | EXON45 | SLUCAS9 | + | AGACCTCCTGCCACCGCAGATT |
| 4058 | EXON45 | SLUCAS9 | + | CCAATTTTTCCTGTAGAATA |
| 4059 | EXON45 | SLUCAS9 | + | CCCAATTTTTCCTGTAGAATA |
| 129 | EXON45 | SLUCAS9 | + | TCCCAATTTTTCCTGTAGAATA |
| 4060 | EXON45 | SLUCAS9 | + | GAATACTGGCATCTGTTTTT |
| 4061 | EXON45 | SLUCAS9 | + | AGAATACTGGCATCTGTTTTT |
| 130 | EXON45 | SLUCAS9 | + | TAGAATACTGGCATCTGTTTTT |
| 4062 | EXON45 | SLUCAS9 | + | TGCCGCTGCCCAATGCCATC |
| 4063 | EXON45 | SLUCAS9 | + | TTGCCGCTGCCCAATGCCATC |
| 131 | EXON45 | SLUCAS9 | + | TTTGCCGCTGCCCAATGCCATC |
| 4064 | EXON45 | SLUCAS9 | + | AGTTCCTGTAAGATACCAAA |
| 4065 | EXON45 | SLUCAS9 | + | GAGTTCCTGTAAGATACCAAA |
| 132 | EXON45 | SLUCAS9 | + | GGAGTTCCTGTAAGATACCAAA |
| 4066 | EXON45 | SLUCAS9 | − | AGAGGTAGGGCGACAGATCT |
| 4067 | EXON45 | SLUCAS9 | − | AGAGGTAGGGCGACAGATCTA |
| 133 | EXON45 | SLUCAS9 | − | AGAGGTAGGGCGACAGATCTAA |
| 4068 | EXON45 | SLUCAS9 | − | CTGTCAGACAGAAAAAAGAG |
| 4069 | EXON45 | SLUCAS9 | − | CTGTCAGACAGAAAAAAGAGG |
| 134 | EXON45 | SLUCAS9 | − | CTGTCAGACAGAAAAAAGAGGT |
| 4070 | EXON45 | SLUCAS9 | − | GCTGTCAGACAGAAAAAAGA |
| 4071 | EXON45 | SLUCAS9 | − | GCTGTCAGACAGAAAAAAGAG |
| 135 | EXON45 | SLUCAS9 | − | GCTGTCAGACAGAAAAAAGAGG |
| 4072 | EXON45 | SLUCAS9 | − | AACAGCTGTCAGACAGAAAA |
| 4073 | EXON45 | SLUCAS9 | − | AACAGCTGTCAGACAGAAAAA |
| 136 | EXON45 | SLUCAS9 | − | AACAGCTGTCAGACAGAAAAAA |
| 4074 | EXON45 | SLUCAS9 | − | AAGCCTGAATCTGCGGTGGC |
| 4075 | EXON45 | SLUCAS9 | − | AAGCCTGAATCTGCGGTGGCA |
| 137 | EXON45 | SLUCAS9 | − | AAGCCTGAATCTGCGGTGGCAG |
| 4076 | EXON45 | SLUCAS9 | − | GGGAAGCCTGAATCTGCGGT |
| 4077 | EXON45 | SLUCAS9 | − | GGGAAGCCTGAATCTGCGGTG |
| 138 | EXON45 | SLUCAS9 | − | GGGAAGCCTGAATCTGCGGTGG |
| 4078 | EXON45 | SLUCAS9 | − | AATTGGGAAGCCTGAATCTG |
| 4079 | EXON45 | SLUCAS9 | − | AATTGGGAAGCCTGAATCTGC |
| 139 | EXON45 | SLUCAS9 | − | AATTGGGAAGCCTGAATCTGCG |
| 4080 | EXON45 | SLUCAS9 | − | AAAAATTGGGAAGCCTGAAT |
| 4081 | EXON45 | SLUCAS9 | − | AAAAATTGGGAAGCCTGAATC |
| 140 | EXON45 | SLUCAS9 | − | AAAAATTGGGAAGCCTGAATCT |
| 4082 | EXON45 | SLUCAS9 | − | GCCAGTATTCTACAGGAAAA |
| 4083 | EXON45 | SLUCAS9 | − | GCCAGTATTCTACAGGAAAAA |
| 141 | EXON45 | SLUCAS9 | − | GCCAGTATTCTACAGGAAAAAT |
| 4084 | EXON45 | SLUCAS9 | − | TGCCAGTATTCTACAGGAAA |
| 4085 | EXON45 | SLUCAS9 | − | TGCCAGTATTCTACAGGAAAA |
| 142 | EXON45 | SLUCAS9 | − | TGCCAGTATTCTACAGGAAAAA |
| 4086 | EXON45 | SLUCAS9 | − | AAAAACAGATGCCAGTATTC |
| 4087 | EXON45 | SLUCAS9 | − | AAAAACAGATGCCAGTATTCT |
| 143 | EXON45 | SLUCAS9 | − | AAAAACAGATGCCAGTATTCTA |
| 4088 | EXON45 | SLUCAS9 | − | TGTCAGAACATTGAATGCAA |
| 4089 | EXON45 | SLUCAS9 | − | TGTCAGAACATTGAATGCAAC |
| 144 | EXON45 | SLUCAS9 | − | TGTCAGAACATTGAATGCAACT |
| 4090 | EXON45 | SLUCAS9 | − | TTGTCAGAACATTGAATGCA |
| 4091 | EXON45 | SLUCAS9 | − | TTGTCAGAACATTGAATGCAA |
| 145 | EXON45 | SLUCAS9 | − | TTGTCAGAACATTGAATGCAAC |
| 4092 | EXON45 | SLUCAS9 | − | GTTGTCAGAACATTGAATGC |
| 4093 | EXON45 | SLUCAS9 | − | GTTGTCAGAACATTGAATGCA |
| 146 | EXON45 | SLUCAS9 | − | GTTGTCAGAACATTGAATGCAA |
| 4094 | EXON45 | SLUCAS9 | − | AACTCCAGGATGGCATTGGG |
| 4095 | EXON45 | SLUCAS9 | − | AACTCCAGGATGGCATTGGGC |
| 147 | EXON45 | SLUCAS9 | − | AACTCCAGGATGGCATTGGGCA |
| 4096 | EXON45 | SLUCAS9 | − | TACAGGAACTCCAGGATGGC |
| 4097 | EXON45 | SLUCAS9 | − | TACAGGAACTCCAGGATGGCA |
| 148 | EXON45 | SLUCAS9 | − | TACAGGAACTCCAGGATGGCAT |
| 4098 | EXON45 | SLUCAS9 | − | TTACAGGAACTCCAGGATGG |
| 4099 | EXON45 | SLUCAS9 | − | TTACAGGAACTCCAGGATGGC |
| 149 | EXON45 | SLUCAS9 | − | TTACAGGAACTCCAGGATGGCA |
| 4100 | EXON45 | SLUCAS9 | − | GGTATCTTACAGGAACTCCA |
| 4101 | EXON45 | SLUCAS9 | − | GGTATCTTACAGGAACTCCAG |
| 150 | EXON45 | SLUCAS9 | − | GGTATCTTACAGGAACTCCAGG |
| 4102 | EXON45 | SLUCAS9 | − | TTTTGGTATCTTACAGGAAC |
| 4103 | EXON45 | SLUCAS9 | − | TTTTGGTATCTTACAGGAACT |
| 151 | EXON45 | SLUCAS9 | − | TTTTGGTATCTTACAGGAACTC |
| 4104 | EXON45 | SLUCAS9 | − | GTTTTGCCTTTTTGGTATCT |
| 4105 | EXON45 | SLUCAS9 | − | GTTTTGCCTTTTTGGTATCTT |
| 152 | EXON45 | SLUCAS9 | − | GTTTTGCCTTTTTGGTATCTTA |
| 4106 | EXON45 | SLUCAS9 | − | TCTTTTCTCAAATAAAAAGA |
| 4107 | EXON45 | SLUCAS9 | − | TCTTTTCTCAAATAAAAAGAC |
| 153 | EXON45 | SLUCAS9 | − | TCTTTTCTCAAATAAAAAGACA |
| 4108 | EXON50 | SLUCAS9 | + | AATGGGATCCAGTATACTTA |
| 4109 | EXON50 | SLUCAS9 | + | GAATGGGATCCAGTATACTTA |
| 154 | EXON50 | SLUCAS9 | + | AGAATGGGATCCAGTATACTTA |
| 4110 | EXON50 | SLUCAS9 | + | TATACTTACAGGCTCCAATA |
| 4111 | EXON50 | SLUCAS9 | + | GTATACTTACAGGCTCCAATA |
| 155 | EXON50 | SLUCAS9 | + | AGTATACTTACAGGCTCCAATA |
| 4112 | EXON50 | SLUCAS9 | + | GGCTCCAATAGTGGTCAGTC |
| 4113 | EXON50 | SLUCAS9 | + | AGGCTCCAATAGTGGTCAGTC |
| 156 | EXON50 | SLUCAS9 | + | CAGGCTCCAATAGTGGTCAGTC |
| 4114 | EXON50 | SLUCAS9 | + | ATAGTGGTCAGTCCAGGAGC |
| 4115 | EXON50 | SLUCAS9 | + | AATAGTGGTCAGTCCAGGAGC |
| 157 | EXON50 | SLUCAS9 | + | CAATAGTGGTCAGTCCAGGAGC |
| 4116 | EXON50 | SLUCAS9 | + | GGTCAGTCCAGGAGCTAGGT |
| 4117 | EXON50 | SLUCAS9 | + | TGGTCAGTCCAGGAGCTAGGT |
| 158 | EXON50 | SLUCAS9 | + | GTGGTCAGTCCAGGAGCTAGGT |
| 4118 | EXON50 | SLUCAS9 | + | GCCCTCAGCTCTTGAAGTAA |
| 4119 | EXON50 | SLUCAS9 | + | TGCCCTCAGCTCTTGAAGTAA |
| 159 | EXON50 | SLUCAS9 | + | TTGCCCTCAGCTCTTGAAGTAA |
| 4120 | EXON50 | SLUCAS9 | − | AGTATACTGGATCCCATTCT |
| 4121 | EXON50 | SLUCAS9 | − | AGTATACTGGATCCCATTCTC |
| 160 | EXON50 | SLUCAS9 | − | AGTATACTGGATCCCATTCTCT |
| 4122 | EXON50 | SLUCAS9 | − | ACTATTGGAGCCTGTAAGTA |
| 4123 | EXON50 | SLUCAS9 | − | ACTATTGGAGCCTGTAAGTAT |
| 161 | EXON50 | SLUCAS9 | − | ACTATTGGAGCCTGTAAGTATA |
| 4124 | EXON50 | SLUCAS9 | − | CTAGCTCCTGGACTGACCAC |
| 4125 | EXON50 | SLUCAS9 | − | CTAGCTCCTGGACTGACCACT |
| 162 | EXON50 | SLUCAS9 | − | CTAGCTCCTGGACTGACCACTA |
| 4126 | EXON50 | SLUCAS9 | − | GCAAAGCAGCCTGACCTAGC |
| 4127 | EXON50 | SLUCAS9 | − | GCAAAGCAGCCTGACCTAGCT |
| 163 | EXON50 | SLUCAS9 | − | GCAAAGCAGCCTGACCTAGCTC |
| 4128 | EXON50 | SLUCAS9 | − | AAACCGTTTACTTCAAGAGC |
| 4129 | EXON50 | SLUCAS9 | − | AAACCGTTTACTTCAAGAGCT |
| 164 | EXON50 | SLUCAS9 | − | AAACCGTTTACTTCAAGAGCTG |
| 4130 | EXON50 | SLUCAS9 | − | TAAACCGTTTACTTCAAGAG |
| 4131 | EXON50 | SLUCAS9 | − | TAAACCGTTTACTTCAAGAGC |
| 165 | EXON50 | SLUCAS9 | − | TAAACCGTTTACTTCAAGAGCT |
| 4132 | EXON50 | SLUCAS9 | − | AGATCTGAGCTCTGAGTGGA |
| 4133 | EXON50 | SLUCAS9 | − | AGATCTGAGCTCTGAGTGGAA |
| 166 | EXON50 | SLUCAS9 | − | AGATCTGAGCTCTGAGTGGAAG |
| 4134 | EXON50 | SLUCAS9 | − | AGAAGATCTGAGCTCTGAGT |
| 4135 | EXON50 | SLUCAS9 | − | AGAAGATCTGAGCTCTGAGTG |
| 167 | EXON50 | SLUCAS9 | − | AGAAGATCTGAGCTCTGAGTGG |
| 4135 | EXON50 | SLUCAS9 | − | AGTTAGAAGATCTGAGCTCT |
| 4137 | EXON50 | SLUCAS9 | − | AGTTAGAAGATCTGAGCTCTG |
| 168 | EXON50 | SLUCAS9 | − | AGTTAGAAGATCTGAGCTCTGA |
| 4138 | EXON50 | SLUCAS9 | − | ATGTGTATGCTTTTCTGTTA |
| 4139 | EXON50 | SLUCAS9 | − | ATGTGTATGCTTTTCTGTTAA |
| 169 | EXON50 | SLUCAS9 | − | ATGTGTATGCTTTTCTGTTAAA |
| 4140 | EXON51 | SLUCAS9 | + | ATCATCTCGTTGATATCCTC |
| 4141 | EXON51 | SLUCAS9 | + | GATCATCTCGTTGATATCCTC |
| 170 | EXON51 | SLUCAS9 | + | TGATCATCTCGTTGATATCCTC |
| 4142 | EXON51 | SLUCAS9 | + | GATCAAGCAGAGAAAGCCAG |
| 4143 | EXON51 | SLUCAS9 | + | TGATCAAGCAGAGAAAGCCAG |
| 171 | EXON51 | SLUCAS9 | + | TTGATCAAGCAGAGAAAGCCAG |
| 4144 | EXON51 | SLUCAS9 | + | TCGGTAAGTTCTGTCCAAGC |
| 4145 | EXON51 | SLUCAS9 | + | GTCGGTAAGTTCTGTCCAAGC |
| 172 | EXON51 | SLUCAS9 | + | AGTCGGTAAGTTCTGTCCAAGC |
| 4146 | EXON51 | SLUCAS9 | + | CCGGTTGAAATCTGCCAGAG |
| 4147 | EXON51 | SLUCAS9 | + | CCCGGTTGAAATCTGCCAGAG |
| 173 | EXON51 | SLUCAS9 | + | GCCCGGTTGAAATCTGCCAGAG |
| 4148 | EXON51 | SLUCAS9 | + | GAGCAGGTACCTCCAACATC |
| 4149 | EXON51 | SLUCAS9 | + | AGAGCAGGTACCTCCAACATC |
| 174 | EXON51 | SLUCAS9 | + | CAGAGCAGGTACCTCCAACATC |
| 4150 | EXON51 | SLUCAS9 | + | TACCTCCAACATCAAGGAAG |
| 4151 | EXON51 | SLUCAS9 | + | GTACCTCCAACATCAAGGAAG |
| 175 | EXON51 | SLUCAS9 | + | GGTACCTCCAACATCAAGGAAG |
| 4152 | EXON51 | SLUCAS9 | + | AGGAAGATGGCATTTCTAGT |
| 4153 | EXON51 | SLUCAS9 | + | AAGGAAGATGGCATTTCTAGT |
| 176 | EXON51 | SLUCAS9 | + | CAAGGAAGATGGCATTTCTAGT |
| 4154 | EXON51 | SLUCAS9 | + | ATGGCATTTCTAGTTTGGAG |
| 4155 | EXON51 | SLUCAS9 | + | GATGGCATTTCTAGTTTGGAG |
| 177 | EXON51 | SLUCAS9 | + | AGATGGCATTTCTAGTTTGGAG |
| 4156 | EXON51 | SLUCAS9 | + | GGCAGTTTCCTTAGTAACCA |
| 4157 | EXON51 | SLUCAS9 | + | TGGCAGTTTCCTTAGTAACCA |
| 178 | EXON51 | SLUCAS9 | + | ATGGCAGTTTCCTTAGTAACCA |
| 4158 | EXON51 | SLUCAS9 | + | CACCAGAGTAACAGTCTGAG |
| 4159 | EXON51 | SLUCAS9 | + | TCACCAGAGTAACAGTCTGAG |
| 179 | EXON51 | SLUCAS9 | + | GTCACCAGAGTAACAGTCTGAG |
| 4160 | EXON51 | SLUCAS9 | + | TGAGTAGGAGCTAAAATATT |
| 4161 | EXON51 | SLUCAS9 | + | CTGAGTAGGAGCTAAAATATT |
| 180 | EXON51 | SLUCAS9 | + | TCTGAGTAGGAGCTAAAATATT |
| 4162 | EXON51 | SLUCAS9 | + | GAGTAGGAGCTAAAATATTT |
| 4163 | EXON51 | SLUCAS9 | + | TGAGTAGGAGCTAAAATATTT |
| 181 | EXON51 | SLUCAS9 | + | CTGAGTAGGAGCTAAAATATTT |
| 4164 | EXON51 | SLUCAS9 | + | ATATTTTGGGTTTTTGCAAA |
| 4165 | EXON51 | SLUCAS9 | + | AATATTTTGGGTTTTTGCAAA |
| 182 | EXON51 | SLUCAS9 | + | AAATATTTTGGGTTTTTGCAAA |
| 4166 | EXON51 | SLUCAS9 | − | GTATGAGAAAAAATGATAAA |
| 4167 | EXON51 | SLUCAS9 | − | GTATGAGAAAAAATGATAAAA |
| 183 | EXON51 | SLUCAS9 | − | GTATGAGAAAAAATGATAAAAG |
| 4168 | EXON51 | SLUCAS9 | − | CAACGAGATGATCATCAAGC |
| 4169 | EXON51 | SLUCAS9 | − | CAACGAGATGATCATCAAGCA |
| 184 | EXON51 | SLUCAS9 | − | CAACGAGATGATCATCAAGCAG |
| 4170 | EXON51 | SLUCAS9 | − | GAGGGTGATGGTGGGTGACC |
| 4171 | EXON51 | SLUCAS9 | − | GAGGGTGATGGTGGGTGACCT |
| 185 | EXON51 | SLUCAS9 | − | GAGGGTGATGGTGGGTGACCTT |
| 4172 | EXON51 | SLUCAS9 | − | ATAAAATCACAGAGGGTGAT |
| 4173 | EXON51 | SLUCAS9 | − | ATAAAATCACAGAGGGTGATG |
| 186 | EXON51 | SLUCAS9 | − | ATAAAATCACAGAGGGTGATGG |
| 4174 | EXON51 | SLUCAS9 | − | TATAAAATCACAGAGGGTGA |
| 4175 | EXON51 | SLUCAS9 | − | TATAAAATCACAGAGGGTGAT |
| 187 | EXON51 | SLUCAS9 | − | TATAAAATCACAGAGGGTGATG |
| 4176 | EXON51 | SLUCAS9 | − | AGTTATAAAATCACAGAGGG |
| 4177 | EXON51 | SLUCAS9 | − | AGTTATAAAATCACAGAGGGT |
| 188 | EXON51 | SLUCAS9 | − | AGTTATAAAATCACAGAGGGTG |
| 4178 | EXON51 | SLUCAS9 | − | TGATCAAGTTATAAAATCAC |
| 4179 | EXON51 | SLUCAS9 | − | TGATCAAGTTATAAAATCACA |
| 189 | EXON51 | SLUCAS9 | − | TGATCAAGTTATAAAATCACAG |
| 4180 | EXON51 | SLUCAS9 | − | TTGATCAAGTTATAAAATCA |
| 4181 | EXON51 | SLUCAS9 | − | TTGATCAAGTTATAAAATCAC |
| 190 | EXON51 | SLUCAS9 | − | TTGATCAAGTTATAAAATCACA |
| 4182 | EXON51 | SLUCAS9 | − | GGGCTTGGACAGAACTTACC |
| 4183 | EXON51 | SLUCAS9 | − | GGGCTTGGACAGAACTTACCG |
| 191 | EXON51 | SLUCAS9 | − | GGGCTTGGACAGAACTTACCGA |
| 4184 | EXON51 | SLUCAS9 | − | CTCTGGCAGATTTCAACCGG |
| 4185 | EXON51 | SLUCAS9 | − | CTCTGGCAGATTTCAACCGGG |
| 192 | EXON51 | SLUCAS9 | − | CTCTGGCAGATTTCAACCGGGC |
| 4186 | EXON51 | SLUCAS9 | − | ACCTGCTCTGGCAGATTTCA |
| 4187 | EXON51 | SLUCAS9 | − | ACCTGCTCTGGCAGATTTCAA |
| 193 | EXON51 | SLUCAS9 | − | ACCTGCTCTGGCAGATTTCAAC |
| 4188 | EXON51 | SLUCAS9 | − | TACCTGCTCTGGCAGATTTC |
| 4189 | EXON51 | SLUCAS9 | − | TACCTGCTCTGGCAGATTTCA |
| 194 | EXON51 | SLUCAS9 | − | TACCTGCTCTGGCAGATTTCAA |
| 4190 | EXON51 | SLUCAS9 | − | CTTGATGTTGGAGGTACCTG |
| 4191 | EXON51 | SLUCAS9 | − | CTTGATGTTGGAGGTACCTGC |
| 195 | EXON51 | SLUCAS9 | − | CTTGATGTTGGAGGTACCTGCT |
| 4192 | EXON51 | SLUCAS9 | − | AATGCCATCTTCCTTGATGT |
| 4193 | EXON51 | SLUCAS9 | − | AATGCCATCTTCCTTGATGTT |
| 196 | EXON51 | SLUCAS9 | − | AATGCCATCTTCCTTGATGTTG |
| 4194 | EXON51 | SLUCAS9 | − | AGAAATGCCATCTTCCTTGA |
| 4195 | EXON51 | SLUCAS9 | − | AGAAATGCCATCTTCCTTGAT |
| 197 | EXON51 | SLUCAS9 | − | AGAAATGCCATCTTCCTTGATG |
| 4196 | EXON51 | SLUCAS9 | − | GGTGACACAACCTGTGGTTA |
| 4197 | EXON51 | SLUCAS9 | − | GGTGACACAACCTGTGGTTAC |
| 198 | EXON51 | SLUCAS9 | − | GGTGACACAACCTGTGGTTACT |
| 4198 | EXON51 | SLUCAS9 | − | TGTTACTCTGGTGACACAAC |
| 4199 | EXON51 | SLUCAS9 | − | TGTTACTCTGGTGACACAACC |
| 199 | EXON51 | SLUCAS9 | − | TGTTACTCTGGTGACACAACCT |
| 4200 | EXON51 | SLUCAS9 | − | AGCTCCTACTCAGACTGTTA |
| 4201 | EXON51 | SLUCAS9 | − | AGCTCCTACTCAGACTGTTAC |
| 200 | EXON51 | SLUCAS9 | − | AGCTCCTACTCAGACTGTTACT |
| 4202 | EXON53 | SLUCAS9 | + | AGGTATCTTTGATACTAACC |
| 4203 | EXON53 | SLUCAS9 | + | AAGGTATCTTTGATACTAACC |
| 201 | EXON53 | SLUCAS9 | + | AAAGGTATCTTTGATACTAACC |
| 4204 | EXON53 | SLUCAS9 | + | TTGGTTTCTGTGATTTTCTT |
| 4205 | EXON53 | SLUCAS9 | + | CTTGGTTTCTGTGATTTTCTT |
| 202 | EXON53 | SLUCAS9 | + | CCTTGGTTTCTGTGATTTTCTT |
| 4206 | EXON53 | SLUCAS9 | + | TTTGGATTGCATCTACTGTA |
| 4207 | EXON53 | SLUCAS9 | + | TTTTGGATTGCATCTACTGTA |
| 203 | EXON53 | SLUCAS9 | + | CTTTTGGATTGCATCTACTGTA |
| 4208 | EXON53 | SLUCAS9 | + | TTGGATTGCATCTACTGTAT |
| 4209 | EXON53 | SLUCAS9 | + | TTTGGATTGCATCTACTGTAT |
| 204 | EXON53 | SLUCAS9 | + | TTTTGGATTGCATCTACTGTAT |
| 4210 | EXON53 | SLUCAS9 | + | CCTCCTTCCATGACTCAAGC |
| 4211 | EXON53 | SLUCAS9 | + | CCCTCCTTCCATGACTCAAGC |
| 205 | EXON53 | SLUCAS9 | + | ACCCTCCTTCCATGACTCAAGC |
| 4212 | EXON53 | SLUCAS9 | + | TCCATGACTCAAGCTTGGCT |
| 4213 | EXON53 | SLUCAS9 | + | TTCCATGACTCAAGCTTGGCT |
| 206 | EXON53 | SLUCAS9 | + | CTTCCATGACTCAAGCTTGGCT |
| 4214 | EXON53 | SLUCAS9 | + | ATTTCATTCAACTGTTGCCT |
| 4215 | EXON53 | SLUCAS9 | + | CATTTCATTCAACTGTTGCCT |
| 207 | EXON53 | SLUCAS9 | + | ACATTTCATTCAACTGTTGCCT |
| 4216 | EXON53 | SLUCAS9 | + | AACTGTTGCCTCCGGTTCTG |
| 4217 | EXON53 | SLUCAS9 | + | CAACTGTTGCCTCCGGTTCTG |
| 208 | EXON53 | SLUCAS9 | + | TCAACTGTTGCCTCCGGTTCTG |
| 4218 | EXON53 | SLUCAS9 | + | AATTCTTTCAACTAGAATAA |
| 4219 | EXON53 | SLUCAS9 | + | GAATTCTTTCAACTAGAATAA |
| 209 | EXON53 | SLUCAS9 | + | TGAATTCTTTCAACTAGAATAA |
| 4220 | EXON53 | SLUCAS9 | − | CCAAAAGAAAATCACAGAAA |
| 4221 | EXON53 | SLUCAS9 | − | CCAAAAGAAAATCACAGAAAC |
| 210 | EXON53 | SLUCAS9 | − | CCAAAAGAAAATCACAGAAACC |
| 4222 | EXON53 | SLUCAS9 | − | GCCAAGCTTGAGTCATGGAA |
| 4223 | EXON53 | SLUCAS9 | − | GCCAAGCTTGAGTCATGGAAG |
| 211 | EXON53 | SLUCAS9 | − | GCCAAGCTTGAGTCATGGAAGG |
| 4224 | EXON53 | SLUCAS9 | − | AGCCAAGCTTGAGTCATGGA |
| 4225 | EXON53 | SLUCAS9 | − | AGCCAAGCTTGAGTCATGGAA |
| 212 | EXON53 | SLUCAS9 | − | AGCCAAGCTTGAGTCATGGAAG |
| 4226 | EXON53 | SLUCAS9 | − | CAGAGCCAAGCTTGAGTCAT |
| 4227 | EXON53 | SLUCAS9 | − | CAGAGCCAAGCTTGAGTCATG |
| 213 | EXON53 | SLUCAS9 | − | CAGAGCCAAGCTTGAGTCATGG |
| 4228 | EXON53 | SLUCAS9 | − | AGGCCAGAGCCAAGCTTGAG |
| 4229 | EXON53 | SLUCAS9 | − | AGGCCAGAGCCAAGCTTGAGT |
| 214 | EXON53 | SLUCAS9 | − | AGGCCAGAGCCAAGCTTGAGTC |
| 4230 | EXON53 | SLUCAS9 | − | AGAAGCTGAGCAGGTCTTAG |
| 4231 | EXON53 | SLUCAS9 | − | AGAAGCTGAGCAGGTCTTAGG |
| 215 | EXON53 | SLUCAS9 | − | AGAAGCTGAGCAGGTCTTAGGA |
| 4232 | EXON53 | SLUCAS9 | − | AAGGAAGAAGCTGAGCAGGT |
| 4233 | EXON53 | SLUCAS9 | − | AAGGAAGAAGCTGAGCAGGTC |
| 216 | EXON53 | SLUCAS9 | − | AAGGAAGAAGCTGAGCAGGTCT |
| 4234 | EXON53 | SLUCAS9 | − | GGAAGCTAAGGAAGAAGCTG |
| 4235 | EXON53 | SLUCAS9 | − | GGAAGCTAAGGAAGAAGCTGA |
| 217 | EXON53 | SLUCAS9 | − | GGAAGCTAAGGAAGAAGCTGAG |
| 4236 | EXON53 | SLUCAS9 | − | TTCAACACAATGGCTGGAAG |
| 4237 | EXON53 | SLUCAS9 | − | TTCAACACAATGGCTGGAAGC |
| 218 | EXON53 | SLUCAS9 | − | TTCAACACAATGGCTGGAAGCT |
| 4238 | EXON53 | SLUCAS9 | − | GTTAAAGGATTCAACACAAT |
| 4239 | EXON53 | SLUCAS9 | − | GTTAAAGGATTCAACACAATG |
| 219 | EXON53 | SLUCAS9 | − | GTTAAAGGATTCAACACAATGG |
| 4240 | EXON53 | SLUCAS9 | − | AAATGTTAAAGGATTCAACA |
| 4241 | EXON53 | SLUCAS9 | − | AAATGTTAAAGGATTCAACAC |
| 220 | EXON53 | SLUCAS9 | − | AAATGTTAAAGGATTCAACACA |
| 4242 | EXON53 | SLUCAS9 | − | GCAACAGTTGAATGAAATGT |
| 4243 | EXON53 | SLUCAS9 | − | GCAACAGTTGAATGAAATGTT |
| 221 | EXON53 | SLUCAS9 | − | GCAACAGTTGAATGAAATGTTA |
| 4244 | EXON53 | SLUCAS9 | − | TACAAGAACACCTTCAGAAC |
| 4245 | EXON53 | SLUCAS9 | − | TACAAGAACACCTTCAGAACC |
| 222 | EXON53 | SLUCAS9 | − | TACAAGAACACCTTCAGAACCG |
| 4246 | EXON53 | SLUCAS9 | − | AAGTACAAGAACACCTTCAG |
| 4247 | EXON53 | SLUCAS9 | − | AAGTACAAGAACACCTTCAGA |
| 223 | EXON53 | SLUCAS9 | − | AAGTACAAGAACACCTTCAGAA |
| 4248 | EXON53 | SLUCAS9 | − | AGTTGAAAGAATTCAGAATC |
| 4249 | EXON53 | SLUCAS9 | − | AGTTGAAAGAATTCAGAATCA |
| 224 | EXON53 | SLUCAS9 | − | AGTTGAAAGAATTCAGAATCAG |
| 4250 | EXON53 | SLUCAS9 | − | TAGTTGAAAGAATTCAGAAT |
| 4251 | EXON53 | SLUCAS9 | − | TAGTTGAAAGAATTCAGAATC |
| 225 | EXON53 | SLUCAS9 | − | TAGTTGAAAGAATTCAGAATCA |

### Example 2: Evaluation of DMD sgRNAs

[0684] A. Materials and Methods

[0685] 1. sgRNA Selection

[0686] A subset of sgRNAs targeting the DMD gene were selected for indel frequency and profile evaluation. The selected sgRNAs are shown in Table 2 and were prepared according to standard methods. The criteria used to select these sgRNAs included their potential to induce exon reframing and or skipping, in addition to the existence of a mouse, dog and a non-human primate (NHP) homologue counterpart. This selection included 13 sgRNAs located within exon 45, three sgRNAs located within exon 51 and ten sgRNAs located within exon 53. The number of predicted off target sites was determined for each sgRNA.

TABLE 2
Exemplary sgRNAs

| | | | | | SEQ ID | | | | SEQ ID | | | |
|---|---|---|---|---|---|---|---|---|---|---|---|---|
| | | | | | NO of | Human | | | NO of | Mouse | | |
| | | | | Human | Human | Guide | | Mouse | Mouse | Guide | | |
| | | Guide | | Guide | Guide | Se- | Human | Guide | Guide | Se- | Mouse | Mis- |
| Exon | Cas9 | type | Strand | ID | Sequence | quence | PAM | ID | Sequence | quence | PAM | matches |
| EXON45 | SluCas9 | Reframe | + | E45SL4 | 131 | TTTGCC | CTGG | mE45SL4 | 300 | cTTGaC | CTGG | 2 |
| | | | | | | GCTGCC | | | | GCTGCC | | |
| | | | | | | CAATGC | | | | CAATGC | | |
| | | | | | | CATC | | | | CATC | | |
| EXON45 | SluCas9 | Splice | − | E45SL7 | 134 | CTGTCA | AGGG | mE45SL7 | 301 | CTGgCA | AGGG | 4 |
| | | | | | | GACAGA | | | | GAaAGg | | |
| | | | | | | AAAAAG | | | | AgAAAG | | |
| | | | | | | AGGT | | | | AGGT | | |
| EXON45 | SluCas9 | Splice | − | E45SL8 | 135 | GCTGTC | TAGG | mE45SL8 | 302 | GCTGgC | TAGG | 4 |
| | | | | | | AGACAG | | | | AGAaAG | | |
| | | | | | | AAAAAA | | | | gAgAAA | | |
| | | | | | | GAGG | | | | GAGG | | |
| EXON45 | SluCas9 | Splice | − | E45SL9 | 136 | AACAGC | GAGG | mE45SL9 | 303 | AAgAGC | GAGG | 5 |
| | | | | | | TGTCAG | | | | TGgCAG | | |
| | | | | | | ACAGAA | | | | AaAGgA | | |
| | | | | | | AAAA | | | | gAAA | | |
| EXON45 | SluCas9 | Reframe | − | E45SL12 | 139 | AATTGG | GTGG | mE45SL12 | 304 | AATTaG | GTGG | 3 |
| | | Alt | | | | GAAGCC | | | | GAAGCt | | |
| | | | | | | TGAATC | | | | TGAgTC | | |
| | | | | | | TGCG | | | | TGCG | | |
| EXON45 | SluCas9 | Reframe | − | E45SL17 | 144 | TGTCAG | GGGG | mE45SL17 | 305 | TGTCAG | GGGG | 1 |
| | | Alt | | | | AACATT | | | | AACAcT | | |
| | | | | | | GAATGC | | | | GAATGC | | |
| | | | | | | AACT | | | | AACT | | |
| EXON45 | SluCas9 | Reframe | − | E45SL21 | 148 | TACAGG | TGGG | mE45SL21 | 306 | TACAGG | TGGG | 0 |
| | | | | | | AACTCC | | | | AACTCC | | |
| | | | | | | AGGATG | | | | AGGATG | | |
| | | | | | | GCAT | | | | GCAT | | |
| EXON45 | SluCas9 | Reframe | − | E45SL22 | 149 | TTACAG | TTGG | mE45SL22 | 307 | TTACAG | TTGG | 0 |
| | | | | | | GAACTC | | | | GAACTC | | |
| | | | | | | CAGGAT | | | | CAGGAT | | |
| | | | | | | GGCA | | | | GGCA | | |
| EXON45 | SluCas9 | Reframe; | − | E45SL23 | 150 | GGTATC | ATGG | mE45SL23 | 308 | GaTggC | ATGG | 3 |
| | | Splice | | | | TTACAG | | | | TTACAG | | |
| | | | | | | GAACTC | | | | GAACTC | | |
| | | | | | | CAGG | | | | CAGG | | |
| EXON45 | SluCas9 | Reframe; | − | E45SL24 | 151 | TTTTGG | CAGG | mE45SL24 | 309 | TTcTGa | CAGG | 4 |
| | | Splice | | | | TATCTT | | | | TggCTT | | |
| | | | | | | ACAGGA | | | | ACAGGA | | |
| | | | | | | ACTC | | | | ACTC | | |
| EXON51 | SluCas9 | Reframe | + | E51SL10 | 179 | GTCACC | TAGG | mE51SL10 | 310 | NA | NA | NA |
| | | | | | | AGAGTA | | | | | | |
| | | | | | | ACAGTC | | | | | | |
| | | | | | | TGAG | | | | | | |
| EXON51 | SluCas9 | Splice | − | E515L15 | 184 | CAACGA | AAGG | mE51SL15 | 311 | CAAtGA | AAGG | 3 |
| | | | | | | GATGAT | | | | aATGAT | | |
| | | | | | | CATCAA | | | | CATCAA | | |
| | | | | | | GCAG | | | | aCAG | | |
| EXON53 | SluCas9 | Splice | + | E53SL1 | 201 | AAAGGT | TTGG | mE53SL1 | 312 | AAAGaT | TTGG | 4 |
| | | | | | | ATCTTT | | | | ATgcTT | | |
| | | | | | | GATACT | | | | GAcACT | | |
| | | | | | | AACC | | | | AACC | | |
| EXON53 | SluCas9 | Splice | − | E53SL10 | 210 | CCAAAA | AAGG | mE53SL10 | 313 | CCAAAA | AAGG | 1 |
| | | | | | | GAAAAT | | | | GAAgAT | | |
| | | | | | | CACAGA | | | | CACAGA | | |
| | | | | | | AACC | | | | AACC | | |
| EXON53 | SluCas9 | Reframe | − | E53SL23 | 223 | AAGTAC | CCGG | mE53SL23 | 314 | AgGTtC | CAGG | 4 |
| | | | | | | AAGAAC | | | | AAGAAC | | |
| | | | | | | ACCTTC | | | | AgCTgC | | |
| | | | | | | AGAA | | | | AGAA | | |
| EXON53 | SluCas9 | Reframe | − | E53SL24 | 224 | AGTTGA | TGGG | mE53SL24 | 315 | AGTTGA | TGGG | 1 |
| | | | | | | AAGAAT | | | | AAGAAT | | |
| | | | | | | TCAGAA | | | | TCAGAt | | |
| | | | | | | TCAG | | | | TCAG | | |
| EXON53 | SluCas9 | Reframe | − | E53SL25 | 225 | TAGTTG | GTGG | mE53SL25 | 316 | cAGTTG | GTGG | 2 |
| | | | | | | AAAGAA | | | | AAAGAA | | |
| | | | | | | TTCAGA | | | | TTCAGA | | |
| | | | | | | ATCA | | | | tTCA | | |
| EXON45 | SaCas9 | Reframe | + | E45Sa4 | 12 | TTGCCG | TTG | mE45Sa4 | 317 | TTGaCG | TGG | 1 |
| | | | | | | CTGCCC | GAG | | | CTGCCC | AGT | |
| | | | | | | AATGCC | | | | AATGCC | | |
| | | | | | | ATCC | | | | ATCC | | |
| EXON45 | SaCas9 | Reframe | − | E45Sa7 | 15 | GCGGCA | TTG | mE45Sa7 | 318 | GCGtCA | CTG | 2 |
| | | | | | | AACTGT | AAT | | | AgCTGT | AAT | |
| | | | | | | TGTCAG | | | | TGTCAG | | |
| | | | | | | AACA | | | | AACA | | |
| EXON45 | SaCas9 | Reframe; | − | E45Sa8 | 16 | TTTTGG | CAG | mE45Sa8 | 319 | TTcTGa | CAG | 4 |
| | | Splice | | | | TATCTT | GAT | | | TggCTT | GAT | |
| | | | | | | ACAGGA | | | | ACAGGA | | |
| | | | | | | ACTC | | | | ACTC | | |
| EXON51 | SaCas9 | Reframe | + | E51Sa2 | 20 | GTTGTG | CTG | mE51Sa2 | 320 | NA | NA | NA |
| | | | | | | TCACCA | AGT | | | | | |
| | | | | | | GAGTAA | | | | | | |
| | | | | | | CAGT | | | | | | |
| EXON53 | SaCas9 | Reframe | + | E53Sa3 | 27 | CTTGTA | CTG | mE53Sa3 | 321 | CTTGaA | CTG | 3 |
| | | | | | | CTTCAT | AAT | | | CcTCAT | AAT | |
| | | | | | | CCCACT | | | | CCCACT | | |
| | | | | | | GATT | | | | GAaT | | |
| EXON53 | SaCas9 | Reframe; | + | E53Sa4 | 28 | ACTGAT | TAG | mE53Sa4 | 322 | ACTGAa | TGG | 1 |
| | | Splice | | | | TCTGAA | AAT | | | TCTGAA | AAT | |
| | | | | | | TTCTTT | | | | TTCTTT | | |
| | | | | | | CAAC | | | | CAAC | | |
| EXON53 | SaCas9 | Reframe | − | E53Sa8 | 32 | CCTTCA | TTG | mE53Sa8 | 323 | gCTgCA | TTG | 4 |
| | | | | | | GAACCG | AAT | | | GAACaG | AAT | |
| | | | | | | GAGGCA | | | | GAGaCA | | |
| | | | | | | ACAG | | | | ACAG | | |
| EXON53 | SaCas9 | Reframe | − | E53Sa9 | 33 | AGTTGA | TGG | mE53Sa9 | 324 | AGTTGA | TGG | 1 |
| | | | | | | AAGAAT | GAT | | | AAGAAT | GAT | |
| | | | | | | TCAGAA | | | | TCAGAt | | |
| | | | | | | TCAG | | | | TCAG | | |
| EXON53 | SaCas9 | Reframe; | − | E53Sa11 | 35 | TTTTTC | AAG | mE53Sa11 | 325 | TTcTTa | AAG | 4 |
| | | Splice | | | | CTTTTA | AAT | | | tTTTTA | AAT | |
| | | | | | | TTCTAG | | | | TTCcAG | | |
| | | | | | | TTGA | | | | TTGA | | |
| EXON45 | SpCas9 | Reframe | − | E45Sp52 | 400 | ATCTTA | TGG | mE45Sp52 | 403 | ggCTTA | TGG | 2 |
| | | | | | | CAGGAA | | | | CAGGAA | | |
| | | | | | | CTCCAG | | | | CTCCAG | | |
| | | | | | | GA | | | | GA | | |
| EXON51 | SpCas9 | Reframe | + | E51Sp32 | 401 | CACCAG | TAG | mE51Sp32 | 404 | CACtAG | TGG | 2 |
| | | | | | | AGTAAC | | | | AGTAAC | | |
| | | | | | | AGTCTG | | | | AGTCTG | | |
| | | | | | | AG | | | | Ac | | |
| EXON53 | SpCas9 | Reframe | − | E53Sp63 | 402 | TTGAAA | TGG | mE53Sp63 | 405 | TTGAAA | TGG | 1 |
| | | | | | | GAATTC | | | | GAATTC | | |
| | | | | | | AGAATC | | | | AGAtTC | | |
| | | | | | | AG | | | | AG | | |

[0687] 2. Transfection of HECK293FT and Neuro-2a Cells

[0688] To evaluate indel frequency and profile, human HEK293FT and mouse Neuro-2a cell lines were used. HEK293FT and Neuro-2a cells were transfected in 12-well plates with 750 ng plasmid+2.25 μL of Lipofectamine 2000. Three days after transfection, cells were trypsinized and sorted for green fluorescent protein (GFP). GFP-positive cells were sorted directly into lysis buffer, and DNA extraction was performed using the GeneJet Genomic DNA Purification Kit. PCR was then performed on the DNA using exon-specific primers that targeted the relevant cut site.

[0689] 3. Amplicon Deep Sequencing, Library Preparation, and Data Analysis

[0690] The relevant loci for each exon were amplified by PCR and the products were used to prepare sequencing libraries using MiSeq reagent kit V3. Indel analysis was performed using CRISPResso2±10-nt quantification window. (See, e.g., Clement et al., Nat Biotechnol. 2019 March; 37(3):224-226). Indel profiling consisted of 5 mutually exclusive indel categories, depicted in FIG. 2, and provided below:
[0691] a) NE: non-edited;
[0692] b) RF.+1: 1-nucleotide (nt) insertion leading to reframe;
[0693] c) RF.Other: indels other than 1-nt insertion leading to reframe:
   [0694] Deletion: not extending outside of the reframing window
   [0695] Insertion: <17-nt (i.e., <6 amino acids);
[0696] d) Exon skipping: indels that disrupt the ±6-nt window of the exon/intron boundaries leading to potential exon skipping (outcome requiring validation):
   [0697] The indel has >=9-nt overlap with the splicing window (to disrupt the GT/AG splicing sites); or
[0698] 3) OE: Other indels.

[0699] The following sequences of selected primers were used for amplification of the specific human locus containing the sgRNA targeting sites (Tables 3A-3B) and the specific mouse locus containing the sgRNA targeting sites (Tables 4A-4B).

TABLE 3A
Primers for Amplification (Human)

| Tar- | | |
|---|---|---|
| geting | | |
| exon | Primer ID | Sequence |
| 45 | hE45-T7E1-F2 | GTCTTTCTGTCTTGTATCCTTTGG |
| | | (SEQ ID NO: 800) |
| | hE45-T7E1-R2 | AATGTTAGTGCCTTTCACCC |
| | | (SEQ ID NO: 801) |
| 51 | Ex51_MiSeq_R | CATGAATAAGAGTTTGGCTCAAATTG |
| | | (SEQ ID NO: 802) |
| | Ex51_MiSeq_F | GAGAGTAAAGTGATTGGTGGAAAATC |
| | | (SEQ ID NO: 803) |
| 53 | hEX53_F1 | AAATGTGAGATAACGTTTGGAAG |
| | | (SEQ ID NO: 804) |
| | hEX53_R1 | TTTCAGCTTTAACGTGATTTTCTG |
| | | (SEQ ID NO: 805) |

TABLE 3B
Primer + MiSeq Adapter Sequence (Human)

| Exon | ID | Sequence |
|---|---|---|
| 45 | MiSeq_hE45-T7E1- | TCGTCGGCAGCGTCAGATGTGTATAAGAGACAGGTCTTTCTGTCTTGTATCCTTTG |
| | F2 | G (SEQ ID NO: 806) |
| | MiSeq_hE45-T7E1- | GTCTCGTGGGCTCGGAGATGTGTATAAGAGACAGAATGTTAGTGCCTTTCACCC |
| | R2 | (SEQ ID NO: 807) |
| 51 | MiSeq_Ex51_MiSeq_ | TCGTCGGCAGCGTCAGATGTGTATAAGAGACAGCATGAATAAGAGTTTGGCTCAAA |
| | R | TTG (SEQ ID NO: 808) |
| | MiSeq_Ex51_MiSeq_ | GTCTCGTGGGCTCGGAGATGTGTATAAGAGACAGGAGAGTAAAGTGATTGGTGGAA |
| | F | AATC (SEQ ID NO: 809) |
| 53 | MiSeq_hEX53_F1 | TCGTCGGCAGCGTCAGATGTGTATAAGAGACAGAAATGTGAGATAACGTTTGGAAG |
| | | (SEQ ID NO: 810) |
| | MiSeq_hEX53_R1 | GTCTCGTGGGCTCGGAGATGTGTATAAGAGACAGTTTCAGCTTTAACGTGATTTTC |
| | | TG (SEQ ID NO: 811) |

TABLE 4A
Primers for Amplification (Mouse)

| Targeting | | |
|---|---|---|
| exon | Primer ID | Sequence |
| 45 | mEx45_F3 | TTTTCAGTGTAACTGCACATAAGAG |
| | | (SEQ ID NO: 812) |
| | mEx45_R3 | GCAAAAGTTGTCATTGTTGCT |
| | | (SEQ ID NO: 813) |
| 51 | mEx51_F3 | AAAATTGGCTCTTTTGCTTG |
| | | (SEQ ID NO: 814) |
| | mEx51_R3 | CACAGAGAAAAGGTAGCCTAAAAA |
| | | (SEQ ID NO: 815) |
| 53 | mEx53_F3 | GCACCTTGGATATATTTAATGAGAA |
| | | (SEQ ID NO: 816) |
| | mEx53_R3 | CAAGAATTCCACTTTTCACTTCC |
| | | (SEQ ID NO: 817) |

TABLE 4B
Primer + MiSeq Adapter Sequence (Mouse)

| Exon | ID | Sequence |
|---|---|---|
| 45 | mEx45_F3 | TCGTCGGCAGCGTCAGATGTGTATAAGAG |
| | | ACAGTTTTCAGTGTAACTGCACATAAGAG |
| | | (SEQ ID NO: 818) |
| | mEx45_R3 | GTCTCGTGGGCTCGGAGATGTGTATAAGA |
| | | GACAGGCAAAAGTTGTCATTGTTGCT |
| | | (SEQ ID NO: 819) |
| 51 | mEx51_F3 | TCGTCGGCAGCGTCAGATGTGTATAAGAG |
| | | ACAGAAAATTGGCTCTTTTGCTTG |
| | | (SEQ ID NO: 820) |
| | mEx51_R3 | GTCTCGTGGGCTCGGAGATGTGTATAAGA |
| | | GACAGCACAGAGAAAAGGTAGCCTAAAAA |
| | | (SEQ ID NO: 821) |
| 53 | mEx53_F3 | TCGTCGGCAGCGTCAGATGTGTATAAGAG |
| | | ACAGGCACCTTGGATATATTTAATGAGAA |
| | | (SEQ ID NO: 822) |
| | mEx53_R3 | GTCTCGTGGGCTCGGAGATGTGTATAAGA |
| | | GACAGCAAGAATTCCACTTTTCACTTCC |
| | | (SEQ ID NO: 823) |

[0700] B. Results

[0701] A set of exemplary DMD sgRNAs were evaluated for indel frequency and editing profile with either SaCas9 or SluCas9 (as indicated in Table 2). Among this selection, 13 sgRNAs were located within exon 45, 3 sgRNAs were located within exon 51 and 10 sgRNAs were located within exon 53. To evaluate indel frequency and profile, plasmid transfection was performed in HEK293FT and Neuro-2a cell lines.

[0702] The average indel frequency of sgRNAs targeting exon 45 was determined in HEK293FT cells (FIG. 3A) and in Neuro-2a cells (FIG. 3B), with a high-performing SpCas9 sgRNA (E45Sp52) included as a reference. Of the exon 45-targeting sgRNAs evaluated, 11 sgRNAs showed an average total indel frequency higher than 50% in HEK293FT cells and a similar result was found for 10 sgRNAs tested in the Neuro-2a cell line. With regard to indel profile, E45Sa4 and E45SL24 were found to have the highest percent of combined indels that could lead to potential exon reframing/skipping in HEK293FT cells. In Neuro-2a cells, mE45Sa4 and mE45SL23 showed the highest ranking with respect to these potential outcomes. The sgRNAs E45SL17 and E45SL12 were not applicable to Δ44 mutation.

[0703] The average indel frequency of sgRNAs targeting exon 51 was determined in HEK293FT cells (FIG. 4A) and in Neuro-2a cells (FIG. 4B), with a high-performing SpCas9 sgRNA (E51Sp32) included as a reference. FIG. 4A shows an indel frequency higher than 50% and a combined indel profile that could lead to potential reframing/skipping above 25% for E51Sa2 and E51SL10 in HEK293FT cells. Due to the reduced level of sequence homology for these sgRNAs in the mouse locus, these sgRNAs could not be evaluated in the Neuro-2a cell line (e.g., sgRNAs E51Sa2 and E51SL10 do not have a mouse homolog and see FIG. 4B).

[0704] The average indel frequency of sgRNAs targeting exon 53 was determined in HEK293FT cells (FIG. 5A) and in Neuro-2a cells (FIG. 5B), with a high-performing SpCas9 sgRNA (E55Sp63) included as a reference. FIG. 5A shows an indel frequency higher than 50% for 4 sgRNAs within exon 53 in HEK293FT cells, and FIG. 5B shows a comparable result for 2 sgRNAs in Neuro-2a cells. Of the exon 53-targeting sgRNAs evaluated, E53Sa3 and mE53SL23 show the highest percent of combined indels with potential for reframing/skipping in both cell lines.

### Example 3: Exemplary DMD Guide RNAs for SaCas9 and SluCas9 Variants

[0705] Additional exemplary DMD guide RNAs were designed that may be used with SaCas9 and variants of SaCas9 (e.g., guide sequences having SEQ ID NOs: 1000-1078) and SluCas9 and variants of SluCas9 (e.g., guide sequences having SEQ ID NOs: 2000-2116) in Table 5 below. In particular, guide RNAs were designed based on SaCas9-KKH (for guide sequences having SEQ ID NOs: 1000-1078) with a PAM sequence NNNRRT (N is any nucleotide, R is purine) and SluCas9-KH (for guide sequences having SEQ ID NOs: 2000-2116) with a PAM sequence NNRG.

[0706] Guide RNAs were designed focusing on genomic coordinate regions within exons 45, 51, and 53. For exon 45, the design region was genomic coordinates chrX: 31968307-31968546. For exon 51, the design region was genomic coordinates chrX: 31773928-31774224. For exon 53, the design region was genomic coordinates chrX: 31679343-31679618.

[0707] Off-target site prediction was computationally performed for two sets of mismatches: (1) 3 mismatches+0 bulge; and (2) 2 mismatches+1 bulge. Results are shown in Table 5.

[0708] Guide RNA comprising the guide sequences shown in Table 5 below are prepared according to standard methods in a single guide (sgRNA) format. A single AAV vector is prepared that expresses the guide RNA and a variant SaCas9 (for guide sequences having SEQ ID NOs: 1000-1078) or the guide RNA and a variant SluCas9 (for guide sequences having SEQ ID NOs: 2000-2116). See, Table 5. The AAV vector is administered to cells in vitro and to mice (e.g., mdx mice) in vivo to assess the ability of the AAV to express the guide RNA and Cas9, edit the targeted exon (see Table 5), and thereby treat DMD.

[0709] In particular, the ability of in vivo single AAV-mediated delivery of gene-editing components to successfully remove the mutant genomic sequence by exon skipping in the cardiac and skeletal muscle cells of mdx mice is tested.

TABLE 5
Additional DMD Guide Sequences (human-hg38.p12)

| | | | | Genomic | | | | | |
|---|---|---|---|---|---|---|---|---|---|
| | | | | coordinate | | | | | |
| | | | | chrX_stop | | SEQ ID | | | |
| | | | Genomic | (includes | | NO | | | |
| | | | coordinate | PAM | | Guide | | | Offtargets_ |
| EXON | CAS9 | ID | chrX_start | coordinates) | Strand | sequence | Guide sequence | PAM | grouped |
| 45 | SACAS9 | E45SaCas | 31968359 | 31968387 | + | 1000 | TGTTTGCAGACCTCCTGCCACC | GCAGAT | 20 |
| | KKH | 9KKH1 | | | | | | | |
| 45 | SACAS9 | E45SaCas | 31968373 | 31968401 | + | 1001 | CTGCCACCGCAGATTCAGGCTT | CCCAAT | 9 |
| | KKH | 9KKH2 | | | | | | | |
| 45 | SACAS9 | E45SaCas | 31968387 | 31968415 | + | 9 | TCAGGCTTCCCAATTTTTCCTG | TAGAAT | 37 |
| | KKH | 9KKH3 | | | | | | | |
| 45 | SACAS9 | E45SaCas | 31968409 | 31968437 | + | 10 | TAGAATACTGGCATCTGTTTTT | GAGGAT | 63 |
| | KKH | 9KKH4 | | | | | | | |
| 45 | SACAS9 | E45SaCas | 31968417 | 31968445 | + | 11 | TGGCATCTGTTTTTGAGGATTG | CTGAAT | 35 |
| | KKH | 9KKH5 | | | | | | | |
| 45 | SACAS9 | E45SaCas | 31968432 | 31968460 | + | 1002 | AGGATTGCTGAATTATTTCTTC | CCCAGT | 42 |
| | KKH | 9KKH6 | | | | | | | |
| 45 | SACAS9 | E45SaCas | 31968442 | 31968470 | + | 1003 | AATTATTTCTTCCCCAGTTGCA | TTCAAT | 68 |
| | KKH | 9KKH7 | | | | | | | |
| 45 | SACAS9 | E45SaCas | 31968456 | 31968484 | + | 1004 | CAGTTGCATTCAATGTTCTGAC | AACAGT | 17 |
| | KKH | 9KKH8 | | | | | | | |
| 45 | SACAS9 | E45SaCas | 31968471 | 31968499 | + | 1005 | TTCTGACAACAGTTTGCCGCTG | CCCAAT | 6 |
| | KKH | 9KKH9 | | | | | | | |
| 45 | SACAS9 | E45SaCas | 31968484 | 31968512 | + | 12 | TTGCCGCTGCCCAATGCCATCC | TGGAGT | 5 |
| | KKH | 9KKH10 | | | | | | | |
| 45 | SACAS9 | E45SaCas | 31968495 | 31968523 | + | 1006 | CAATGCCATCCTGGAGTTCCTG | TAAGAT | 27 |
| | KKH | 9KKH11 | | | | | | | |
| 45 | SACAS9 | E45SaCas | 31968517 | 31968545 | + | 1007 | TAAGATACCAAAAAGGCAAAAC | AAAAAT | 96 |
| | KKH | 9KKH12 | | | | | | | |
| 45 | SACAS9 | E45SaCas | 31968313 | 31968341 | - | 13 | GAGGTAGGGCGACAGATCTAAT | AGGAAT | 10 |
| | KKH | 9KKH13 | | | | | | | |
| 45 | SACAS9 | E45SaCas | 31968319 | 31968347 | - | 1008 | AAAAAAGAGGTAGGGCGACAGA | TCTAAT | 75 |
| | KKH | 9KKH14 | | | | | | | |
| 45 | SACAS9 | E45SaCas | 31968324 | 31968352 | - | 1009 | GACAGAAAAAAGAGGTAGGGCG | ACAGAT | 51 |
| | KKH | 9KKH15 | | | | | | | |
| 45 | SACAS9 | E45SaCas | 31968336 | 31968364 | - | 1010 | AAACAGCTGTCAGACAGAAAAA | AGAGGT | 123 |
| | KKH | 9KKH16 | | | | | | | |
| 45 | SACAS9 | E45SaCas | 31968368 | 31968396 | - | 1011 | GAAGCCTGAATCTGCGGTGGCA | GGAGGT | 19 |
| | KKH | 9KKH17 | | | | | | | |
| 45 | SACAS9 | E45SaCas | 31968378 | 31968406 | - | 1012 | GAAAAATTGGGAAGCCTGAATC | TGCGGT | 29 |
| | KKH | 9KKH18 | | | | | | | |
| 45 | SACAS9 | E45SaCas | 31968385 | 31968413 | - | 14 | TCTACAGGAAAAATTGGGAAGC | CTGAAT | 64 |
| | KKH | 9KKH19 | | | | | | | |
| 45 | SACAS9 | E45SaCas | 31968399 | 31968427 | - | 1013 | ACAGATGCCAGTATTCTACAGG | AAAAAT | 22 |
| | KKH | 9KKH20 | | | | | | | |
| 45 | SACAS9 | E45SaCas | 31968415 | 31968443 | - | 1014 | TCAGCAATCCTCAAAAACAGAT | GCCAGT | 50 |
| | KKH | 9KKH21 | | | | | | | |
| 45 | SACAS9 | E45SaCas | 31968421 | 31968449 | - | 1015 | AATAATTCAGCAATCCTCAAAA | ACAGAT | 99 |
| | KKH | 9KKH22 | | | | | | | |
| 45 | SACAS9 | E45SaCas | 31968435 | 31968463 | - | 1016 | GCAACTGGGGAAGAAATAATTC | AGCAAT | 43 |
| | KKH | 9KKH23 | | | | | | | |
| 45 | SACAS9 | E45SaCas | 31968443 | 31968471 | - | 1017 | CATTGAATGCAACTGGGGAAGA | AATAAT | 54 |
| | KKH | 9KKH24 | | | | | | | |
| 45 | SACAS9 | E45SaCas | 31968446 | 31968474 | - | 1018 | GAACATTGAATGCAACTGGGGA | AGAAAT | 23 |
| | KKH | 9KKH25 | | | | | | | |
| 45 | SACAS9 | E45SaCas | 31968463 | 31968491 | - | 15 | GCGGCAAACTGTTGTCAGAACA | TTGAAT | 5 |
| | KKH | 9KKH26 | | | | | | | |
| 45 | SACAS9 | E45SaCas | 31968502 | 31968530 | - | 16 | TTTTGGTATCTTACAGGAACTC | CAGGAT | 52 |
| | KKH | 9KKH27 | | | | | | | |
| 45 | SLUCAS | E45SLCas | 31968332 | 31968358 | + | 2000 | CCCTACCTCTTTTTTCTGTCTG | ACAG | 23 |
| | 9KH | 9KH1 | | | | | | | |
| 45 | SLUCAS | E45SLCas | 31968342 | 31968368 | + | 2001 | TTTTTCTGTCTGACAGCTGTTT | GCAG | 22 |
| | 9KH | 9KH2 | | | | | | | |
| 45 | SLUCAS | E45SLCas | 31968359 | 31968385 | + | 2002 | TGTTTGCAGACCTCCTGCCACC | GCAG | 9 |
| | 9KH | 9KH3 | | | | | | | |
| 45 | SLUCAS | E45SLCas | 31968365 | 31968391 | + | 2003 | CAGACCTCCTGCCACCGCAGAT | TCAG | 9 |
| | 9KH | 9KH4 | | | | | | | |
| 45 | SLUCAS | E45SLCas | 31968366 | 31968392 | + | 128 | AGACCTCCTGCCACCGCAGATT | CAGG | 10 |
| | 9KH | 9KH5 | | | | | | | |
| 45 | SLUCAS | E45SLCas | 31968386 | 31968412 | + | 2004 | TTCAGGCTTCCCAATTTTTCCT | GTAG | 11 |
| | 9KH | 9KH6 | | | | | | | |
| 45 | SLUCAS | E45SLCas | 31968394 | 31968420 | + | 129 | TCCCAATTTTTCCTGTAGAATA | CTGG | 19 |
| | 9KH | 9KH7 | | | | | | | |
| 45 | SLUCAS | E45SLCas | 31968408 | 31968434 | + | 2005 | GTAGAATACTGGCATCTGTTTT | TGAG | 16 |
| | 9KH | 9KH8 | | | | | | | |
| 45 | SLUCAS | E45SLCas | 31968409 | 31968435 | + | 130 | TAGAATACTGGCATCTGTTTTT | GAGG | 19 |
| | 9KH | 9KH9 | | | | | | | |
| 45 | SLUCAS | E45SLCas | 31968433 | 31968459 | + | 2006 | GGATTGCTGAATTATTTCTTCC | CCAG | 18 |
| | 9KH | 9KH10 | | | | | | | |
| 45 | SLUCAS | E45SLCas | 31968457 | 31968483 | + | 2007 | AGTTGCATTCAATGTTCTGACA | ACAG | 10 |
| | 9KH | 9KH11 | | | | | | | |
| 45 | SLUCAS | E45SLCas | 31968483 | 31968509 | + | 131 | TTTGCCGCTGCCCAATGCCATC | CTGG | 2 |
| | 9KH | 9KH12 | | | | | | | |
| 45 | SLUCAS | E45SLCas | 31968485 | 31968511 | + | 2008 | TGCCGCTGCCCAATGCCATCCT | GGAG | 7 |
| | 9KH | 9KH13 | | | | | | | |
| 45 | SLUCAS | E45SLCas | 31968495 | 31968521 | + | 2009 | CAATGCCATCCTGGAGTTCCTG | TAAG | 14 |
| | 9KH | 9KH14 | | | | | | | |
| 45 | SLUCAS | E45SLCas | 31968506 | 31968532 | + | 2010 | TGGAGTTCCTGTAAGATACCAA | AAAG | 10 |
| | 9KH | 9KH15 | | | | | | | |
| 45 | SLUCAS | E45SLCas | 31968507 | 31968533 | + | 132 | GGAGTTCCTGTAAGATACCAAA | AAGG | 9 |
| | 9KH | 9KH16 | | | | | | | |
| 45 | SLUCAS | E45SLCas | 31968316 | 31968342 | - | 133 | AGAGGTAGGGCGACAGATCTAA | TAGG | 6 |
| | 9KH | 9KH17 | | | | | | | |
| 45 | SLUCAS | E45SLCas | 31968317 | 31968343 | - | 2011 | AAGAGGTAGGGCGACAGATCTA | ATAG | 5 |
| | 9KH | 9KH18 | | | | | | | |
| 45 | SLUCAS | E45SLCas | 31968326 | 31968352 | - | 2012 | GACAGAAAAAAGAGGTAGGGCG | ACAG | 31 |
| | 9KH | 9KH19 | | | | | | | |
| 45 | SLUCAS | E45SLCas | 31968332 | 31968358 | - | 134 | CTGTCAGACAGAAAAAAGAGGT | AGGG | 28 |
| | 9KH | 9KH20 | | | | | | | |
| 45 | SLUCAS | E45SLCas | 31968333 | 31968359 | - | 135 | GCTGTCAGACAGAAAAAAGAGG | TAGG | 43 |
| | 9KH | 9KH21 | | | | | | | |
| 45 | SLUCAS | E45SLCas | 31968334 | 31968360 | - | 2013 | AGCTGTCAGACAGAAAAAAGAG | GTAG | 67 |
| | 9KH | 9KH22 | | | | | | | |
| 45 | SLUCAS | E45SLCas | 31968337 | 31968363 | - | 136 | AACAGCTGTCAGACAGAAAAAA | GAGG | 55 |
| | 9KH | 9KH23 | | | | | | | |
| 45 | SLUCAS | E45SLCas | 31968338 | 31968364 | - | 2014 | AAACAGCTGTCAGACAGAAAAA | AGAG | 37 |
| | 9KH | 9KH24 | | | | | | | |
| 45 | SLUCAS | E45SLCas | 31968340 | 31968366 | - | 2015 | GCAAACAGCTGTCAGACAGAAA | AAAG | 27 |
| | 9KH | 9KH25 | | | | | | | |
| 45 | SLUCAS | E45SLCas | 31968347 | 31968373 | - | 2016 | GAGGTCTGCAAACAGCTGTCAG | ACAG | 23 |
| | 9KH | 9KH26 | | | | | | | |
| 45 | SLUCAS | E45SLCas | 31968351 | 31968377 | - | 2017 | GCAGGAGGTCTGCAAACAGCTG | TCAG | 16 |
| | 9KH | 9KH27 | | | | | | | |
| 45 | SLUCAS | E45SLCas | 31968358 | 31968384 | - | 2018 | TGCGGTGGCAGGAGGTCTGCAA | ACAG | 14 |
| | 9KH | 9KH28 | | | | | | | |
| 45 | SLUCAS | E45SLCas | 31968369 | 31968395 | - | 137 | AAGCCTGAATCTGCGGTGGCAG | GAGG | 11 |
| | 9KH | 9KH29 | | | | | | | |
| 45 | SLUCAS | E45SLCas | 31968370 | 31968396 | - | 2019 | GAAGCCTGAATCTGCGGTGGCA | GGAG | 15 |
| | 9KH | 9KH30 | | | | | | | |
| 45 | SLUCAS | E45SLCas | 31968372 | 31968398 | - | 138 | GGGAAGCCTGAATCTGCGGTGG | CAGG | 8 |
| | 9KH | 9KH31 | | | | | | | |
| 45 | SLUCAS | E45SLCas | 31968373 | 31968399 | - | 2020 | TGGGAAGCCTGAATCTGCGGTG | GCAG | 6 |
| | 9KH | 9KH32 | | | | | | | |
| 45 | SLUCAS | E45SLCas | 31968376 | 31968402 | - | 139 | AATTGGGAAGCCTGAATCTGCG | GTGG | 7 |
| | 9KH | 9KH33 | | | | | | | |
| 45 | SLUCAS | E45SLCas | 31968379 | 31968405 | - | 140 | AAAAATTGGGAAGCCTGAATCT | GCGG | 26 |
| | 9KH | 9KH34 | | | | | | | |
| 45 | SLUCAS | E45SLCas | 31968392 | 31968418 | - | 2021 | AGTATTCTACAGGAAAAATTGG | GAAG | 28 |
| | 9KH | 9KH35 | | | | | | | |
| 45 | SLUCAS | E45SLCas | 31968395 | 31968421 | - | 141 | GCCAGTATTCTACAGGAAAAAT | TGGG | 16 |
| | 9KH | 9KH36 | | | | | | | |
| 45 | SLUCAS | E45SLCas | 31968396 | 31968422 | - | 142 | TGCCAGTATTCTACAGGAAAAA | TTGG | 17 |
| | 9KH | 9KH37 | | | | | | | |
| 45 | SLUCAS | E45SLCas | 31968405 | 31968431 | - | 143 | AAAAACAGATGCCAGTATTCTA | CAGG | 21 |
| | 9KH | 9KH38 | | | | | | | |
| 45 | SLUCAS | E45SLCas | 31968406 | 31968432 | - | 2022 | CAAAAACAGATGCCAGTATTCT | ACAG | 28 |
| | 9KH | 9KH39 | | | | | | | |
| 45 | SLUCAS | E45SLCas | 31968416 | 31968442 | - | 2023 | CAGCAATCCTCAAAAACAGATG | CCAG | 23 |
| | 9KH | 9KH40 | | | | | | | |
| 45 | SLUCAS | E45SLCas | 31968423 | 31968449 | - | 2024 | AATAATTCAGCAATCCTCAAAA | ACAG | 31 |
| | 9KH | 9KH41 | | | | | | | |
| 45 | SLUCAS | E45SLCas | 31968439 | 31968465 | - | 2025 | ATGCAACTGGGGAAGAAATAAT | TCAG | 33 |
| | 9KH | 9KH42 | | | | | | | |
| 45 | SLUCAS | E45SLCas | 31968450 | 31968476 | - | 2026 | CAGAACATTGAATGCAACTGGG | GAAG | 11 |
| | 9KH | 9KH43 | | | | | | | |
| 45 | SLUCAS | E45SLCas | 31968453 | 31968479 | - | 144 | TGTCAGAACATTGAATGCAACT | GGGG | 12 |
| | 9KH | 9KH44 | | | | | | | |
| 45 | SLUCAS | E45SLCas | 31968454 | 31968480 | - | 145 | TTGTCAGAACATTGAATGCAAC | TGGG | 30 |
| | 9KH | 9KH45 | | | | | | | |
| 45 | SLUCAS | E45SLCas | 31968455 | 31968481 | - | 146 | GTTGTCAGAACATTGAATGCAA | CTGG | 12 |
| | 9KH | 9KH46 | | | | | | | |
| 45 | SLUCAS | E45SLCas | 31968473 | 31968499 | - | 2027 | ATTGGGCAGCGGCAAACTGTTG | TCAG | 3 |
| | 9KH | 9KH47 | | | | | | | |
| 45 | SLUCAS | E45SLCas | 31968487 | 31968513 | - | 147 | AACTCCAGGATGGCATTGGGCA | GCGG | 9 |
| | 9KH | 9KH48 | | | | | | | |
| 45 | SLUCAS | E45SLCas | 31968490 | 31968516 | - | 2028 | AGGAACTCCAGGATGGCATTGG | GCAG | 16 |
| | 9KH | 9KH49 | | | | | | | |
| 45 | SLUCAS | E45SLCas | 31968493 | 31968519 | - | 148 | TACAGGAACTCCAGGATGGCAT | TGGG | 10 |
| | 9KH | 9KH50 | | | | | | | |
| 45 | SLUCAS | E45SLCas | 31968494 | 31968520 | - | 149 | TTACAGGAACTCCAGGATGGCA | TTGG | 13 |
| | 9KH | 9KH51 | | | | | | | |
| 45 | SLUCAS | E45SLCas | 31968500 | 31968526 | - | 150 | GGTATCTTACAGGAACTCCAGG | ATGG | 7 |
| | 9KH | 9KH52 | | | | | | | |
| 45 | SLUCAS | E45SLCas | 31968504 | 31968530 | - | 151 | TTTTGGTATCTTACAGGAACTC | CAGG | 35 |
| | 9KH | 9KH53 | | | | | | | |
| 45 | SLUCAS | E45SLCas | 31968505 | 31968531 | - | 2029 | TTTTTGGTATCTTACAGGAACT | CCAG | 21 |
| | 9KH | 9KH54 | | | | | | | |
| 45 | SLUCAS | E45SLCas | 31968513 | 31968539 | - | 152 | GTTTTGCCTTTTTGGTATCTTA | CAGG | 32 |
| | 9KH | 9KH55 | | | | | | | |
| 45 | SLUCAS | E45SLCas | 31968514 | 31968540 | - | 2030 | TGTTTTGCCTTTTTGGTATCTT | ACAG | 58 |
| | 9KH | 9KH56 | | | | | | | |
| 51 | SACAS9 | E51SaCas | 31773943 | 31773971 | + | 1019 | TCATTTTTTCTCATACCTTCTG | CTTGAT | 91 |
| | KKH | 9KKH1 | | | | | | | |
| 51 | SACAS9 | E51SaCas | 31773946 | 31773974 | + | 1020 | TTTTTTCTCATACCTTCTGCTT | GATGAT | 132 |
| | KKH | 9KKH2 | | | | | | | |
| 51 | SACAS9 | E51SaCas | 31773958 | 31773986 | + | 1021 | CCTTCTGCTTGATGATCATCTC | GTTGAT | 23 |
| | KKH | 9KKH3 | | | | | | | |
| 51 | SACAS9 | E51SaCas | 31773969 | 31773997 | + | 1022 | ATGATCATCTCGTTGATATCCT | CAAGGT | 15 |
| | KKH | 9KKH4 | | | | | | | |
| 51 | SACAS9 | E51SaCas | 31773992 | 31774020 | + | 1023 | AAGGTCACCCACCATCACCCTC | TGTGAT | 33 |
| | KKH | 9KKH5 | | | | | | | |
| 51 | SACAS9 | E51SaCas | 31774005 | 31774033 | + | 1024 | ATCACCCTCTGTGATTTTATAA | CTTGAT | 45 |
| | KKH | 9KKH6 | | | | | | | |
| 51 | SACAS9 | E51SaCas | 31774023 | 31774051 | + | 1025 | ATAACTTGATCAAGCAGAGAAA | GCCAGT | 101 |
| | KKH | 9KKH7 | | | | | | | |
| 51 | SACAS9 | E51SaCas | 31774027 | 31774055 | + | 1026 | CTTGATCAAGCAGAGAAAGCCA | GTCGGT | 55 |
| | KKH | 9KKH8 | | | | | | | |
| 51 | SACAS9 | E51SaCas | 31774031 | 31774059 | + | 1027 | ATCAAGCAGAGAAAGCCAGTCG | GTAAGT | 16 |
| | KKH | 9KKH9 | | | | | | | |
| 51 | SACAS9 | E51SaCas | 31774047 | 31774075 | + | 1028 | CAGTCGGTAAGTTCTGTCCAAG | CCCGGT | 7 |
| | KKH | 9KKH10 | | | | | | | |
| 51 | SACAS9 | E51SaCas | 31774053 | 31774081 | + | 1029 | GTAAGTTCTGTCCAAGCCCGGT | TGAAAT | 4 |
| | KKH | 9KKH11 | | | | | | | |
| 51 | SACAS9 | E51SaCas | 31774067 | 31774095 | + | 1030 | AGCCCGGTTGAAATCTGCCAGA | GCAGGT | 7 |
| | KKH | 9KKH12 | | | | | | | |
| 51 | SACAS9 | E51SaCas | 31774088 | 31774116 | + | 1031 | AGCAGGTACCTCCAACATCAAG | GAAGAT | 23 |
| | KKH | 9KKH13 | | | | | | | |
| 51 | SACAS9 | E51SaCas | 31774100 | 31774128 | + | 1032 | CAACATCAAGGAAGATGGCATT | TCTACT | 54 |
| | KKH | 9KKH14 | | | | | | | |
| 51 | SACAS9 | E51SaCas | 31774108 | 31774136 | + | 1033 | AGGAAGATGGCATTTCTAGTTT | GGAGAT | 62 |
| | KKH | 9KKH15 | | | | | | | |
| 51 | SACAS9 | E51SaCas | 31774114 | 31774142 | + | 1034 | ATGGCATTTCTAGTTTGGAGAT | GGCAGT | 56 |
| | KKH | 9KKH16 | | | | | | | |
| 51 | SACAS9 | E51SaCas | 31774123 | 31774151 | + | 1035 | CTAGTTTGGAGATGGCAGTTTC | CTTAGT | 32 |
| | KKH | 9KKH17 | | | | | | | |
| 51 | SACAS9 | E51SaCas | 31774133 | 31774161 | + | 1036 | GATGGCAGTTTCCTTAGTAACC | ACAGGT | 24 |
| | KKH | 9KKH18 | | | | | | | |
| 51 | SACAS9 | E51SaCas | 31774147 | 31774175 | + | 19 | TAGTAACCACAGGTTGTGTCAC | CAGAGT | 18 |
| | KKH | 9KKH19 | | | | | | | |
| 51 | SACAS9 | E51SaCas | 31774153 | 31774181 | + | 1037 | CCACAGGTTGTGTCACCAGAGT | AACAGT | 20 |
| | KKH | 9KKH20 | | | | | | | |
| 51 | SACAS9 | E51SaCas | 31774159 | 31774187 | + | 20 | GTTGTGTCACCAGAGTAACAGT | CTGAGT | 21 |
| | KKH | 9KKH21 | | | | | | | |
| 51 | SACAS9 | E51SaCas | 31774171 | 31774199 | + | 1038 | GAGTAACAGTCTGAGTAGGAGC | TAAAAT | 18 |
| | KKH | 9KKH22 | | | | | | | |
| 51 | SACAS9 | E51SaCas | 31774180 | 31774208 | + | 21 | TCTGAGTAGGAGCTAAAATATT | TTGGGT | 38 |
| | KKH | 9KKH23 | | | | | | | |
| 51 | SACAS9 | E51SaCas | 31773936 | 31773964 | - | 1039 | AGAAGGTATGAGAAAAAATGAT | AAAAGT | 236 |
| | KKH | 9KKH24 | | | | | | | |
| 51 | SACAS9 | E51SaCas | 31773942 | 31773970 | - | 1040 | TCAAGCAGAAGGTATGAGAAAA | AATGAT | 99 |
| | KKH | 9KKH25 | | | | | | | |
| 51 | SACAS9 | E51SaCas | 31773945 | 31773973 | - | 1041 | TCATCAAGCAGAAGGTATGAGA | AAAAAT | 43 |
| | KKH | 9KKH26 | | | | | | | |
| 51 | SACAS9 | E51SaCas | 31773957 | 31773985 | - | 1042 | TCAACGAGATGATCATCAAGCA | GAAGGT | 10 |
| | KKH | 9KKH27 | | | | | | | |
| 51 | SACAS9 | E51SaCas | 31773972 | 31774000 | - | 1043 | GTGACCTTGAGGATATCAACGA | GATGAT | 7 |
| | KKH | 9KKH28 | | | | | | | |
| 51 | SACAS9 | E51SaCas | 31773975 | 31774003 | - | 1044 | TGGGTGACCTTGAGGATATCAA | CGAGAT | 68 |
| | KKH | 9KKH29 | | | | | | | |
| 51 | SACAS9 | E51SaCas | 31773986 | 31774014 | - | 22 | GAGGGTGATGGTGGGTGACCTT | GAGGAT | 46 |
| | KKH | 9KKH30 | | | | | | | |
| 51 | SACAS9 | E51SaCas | 31773998 | 31774026 | - | 23 | TATAAAATCACAGAGGGTGATG | GTGGGT | 42 |
| | KKH | 9KKH31 | | | | | | | |
| 51 | SACAS9 | E51SaCas | 31774002 | 31774030 | - | 1045 | AAGTTATAAAATCACAGAGGGT | GATGGT | 77 |
| | KKH | 9KKH32 | | | | | | | |
| 51 | SACAS9 | E51SaCas | 31774005 | 31774033 | - | 1046 | ATCAAGTTATAAAATCACAGAG | GGTGAT | 90 |
| | KKH | 9KKH33 | | | | | | | |
| 51 | SACAS9 | E51SaCas | 31774008 | 31774036 | - | 24 | TTGATCAAGTTATAAAATCACA | GAGGGT | 86 |
| | KKH | 9KKH34 | | | | | | | |
| 51 | SACAS9 | E51SaCas | 31774018 | 31774046 | - | 1047 | CTTTCTCTGCTTGATCAAGTTA | TAAAAT | 45 |
| | KKH | 9KKH35 | | | | | | | |
| 51 | SACAS9 | E51SaCas | 31774026 | 31774054 | - | 1048 | CCGACTGGCTTTCTCTGCTTGA | TCAAGT | 18 |
| | KKH | 9KKH36 | | | | | | | |
| 51 | SACAS9 | E51SaCas | 31774031 | 31774059 | - | 1049 | ACTTACCGACTGGCTTTCTCTG | CTTGAT | 11 |
| | KKH | 9KKH37 | | | | | | | |
| 51 | SACAS9 | E51SaCas | 31774079 | 31774107 | - | 1050 | GATGTTGGAGGTACCTGCTCTG | GCAGAT | 22 |
| | KKH | 9KKH38 | | | | | | | |
| 51 | SACAS9 | E51SaCas | 31774095 | 31774123 | - | 1051 | AAATGCCATCTTCCTTGATGTT | GGAGGT | 57 |
| | KKH | 9KKH39 | | | | | | | |
| 51 | SACAS9 | E51SaCas | 31774104 | 31774132 | - | 1052 | CCAAACTAGAAATGCCATCTTC | CTTGAT | 46 |
| | KKH | 9KKH40 | | | | | | | |
| 51 | SACAS9 | E51SaCas | 31774119 | 31774147 | - | 1053 | AGGAAACTGCCATCTCCAAACT | AGAAAT | 63 |
| | KKH | 9KKH41 | | | | | | | |
| 51 | SACAS9 | E51SaCas | 31774152 | 31774180 | - | 1054 | CTGTTACTCTGGTGACACAACC | TGTGGT | 27 |
| | KKH | 9KKH42 | | | | | | | |
| 51 | SACAS9 | E51SaCas | 31774167 | 31774195 | - | 1055 | TAGCTCCTACTCAGACTGTTAC | TCTGGT | 13 |
| | KKH | 9KKH43 | | | | | | | |
| 51 | SLUCAS | E51SLCas | 31773969 | 31773995 | + | 2031 | ATGATCATCTCGTTGATATCCT | CAAG | 6 |
| | 9KH | 9KH1 | | | | | | | |
| 51 | SLUCAS | E51SLCas | 31773970 | 31773996 | + | 170 | TGATCATCTCGTTGATATCCTC | AAGG | 6 |
| | 9KH | 9KH2 | | | | | | | |
| 51 | SLUCAS | E51SLCas | 31774011 | 31774037 | + | 2032 | CTCTGTGATTTTATAACTTGAT | CAAG | 18 |
| | 9KH | 9KH3 | | | | | | | |
| 51 | SLUCAS | E51SLCas | 31774014 | 31774040 | + | 2033 | TGTGATTTTATAACTTGATCAA | GCAG | 29 |
| | 9KH | 9KH4 | | | | | | | |
| 51 | SLUCAS | E51SLCas | 31774016 | 31774042 | + | 2034 | TGATTTTATAACTTGATCAAGC | AGAG | 15 |
| | 9KH | 9KH5 | | | | | | | |
| 51 | SLUCAS | E51SLCas | 31774020 | 31774046 | + | 2035 | TTTATAACTTGATCAAGCAGAG | AAAG | 7 |
| | 9KH | 9KH6 | | | | | | | |
| 51 | SLUCAS | E51SLCas | 31774024 | 31774050 | + | 2036 | TAACTTGATCAAGCAGAGAAAG | CCAG | 24 |
| | 9KH | 9KH7 | | | | | | | |
| 51 | SLUCAS | E51SLCas | 31774028 | 31774054 | + | 171 | TTGATCAAGCAGAGAAAGCCAG | TCGG | 23 |
| | 9KH | 9KH8 | | | | | | | |
| 51 | SLUCAS | E51SLCas | 31774032 | 31774058 | + | 2037 | TCAAGCAGAGAAAGCCAGTCGG | TAAG | 7 |
| | 9KH | 9KH9 | | | | | | | |
| 51 | SLUCAS | E51SLCas | 31774043 | 31774069 | + | 2038 | AAGCCAGTCGGTAAGTTCTGTC | CAAG | 7 |
| | 9KH | 9KH10 | | | | | | | |
| 51 | SLUCAS | E51SLCas | 31774048 | 31774074 | + | 172 | AGTCGGTAAGTTCTGTCCAAGC | CCGG | 2 |
| | 9KH | 9KH11 | | | | | | | |
| 51 | SLUCAS | E51SLCas | 31774062 | 31774088 | + | 2039 | GTCCAAGCCCGGTTGAAATCTG | CCAG | 1 |
| | 9KH | 9KH12 | | | | | | | |
| 51 | SLUCAS | E51SLCas | 31774064 | 31774090 | + | 2040 | CCAAGCCCGGTTGAAATCTGCC | AGAG | 2 |
| | 9KH | 9KH13 | | | | | | | |
| 51 | SLUCAS | E51SLCas | 31774067 | 31774093 | + | 2041 | AGCCCGGTTGAAATCTGCCAGA | GCAG | 4 |
| | 9KH | 9KH14 | | | | | | | |
| 51 | SLUCAS | E51SLCas | 31774068 | 31774094 | + | 173 | GCCCGGTTGAAATCTGCCAGAG | CAGG | 5 |
| | 9KH | 9KH15 | | | | | | | |
| 51 | SLUCAS | E51SLCas | 31774084 | 31774110 | + | 2042 | CCAGAGCAGGTACCTCCAACAT | CAAG | 14 |
| | 9KH | 9KH16 | | | | | | | |
| 51 | SLUCAS | E51SLCas | 31774085 | 31774111 | + | 174 | CAGAGCAGGTACCTCCAACATC | AAGG | 13 |
| | 9KH | 9KH17 | | | | | | | |
| 51 | SLUCAS | E51SLCas | 31774088 | 31774114 | + | 2043 | AGCAGGTACCTCCAACATCAAG | GAAG | 12 |
| | 9KH | 9KH18 | | | | | | | |
| 51 | SLUCAS | E51SLCas | 31774092 | 31774118 | + | 175 | GGTACCTCCAACATCAAGGAAG | ATGG | 6 |
| | 9KH | 9KH19 | | | | | | | |
| 51 | SLUCAS | E51SLCas | 31774101 | 31774127 | + | 2044 | AACATCAAGGAAGATGGCATTT | CTAG | 32 |
| | 9KH | 9KH20 | | | | | | | |
| 51 | SLUCAS | E51SLCas | 31774106 | 31774132 | + | 176 | CAAGGAAGATGGCATTTCTAGT | TTGG | 21 |
| | 9KH | 9KH21 | | | | | | | |
| 51 | SLUCAS | E51SLCas | 31774108 | 31774134 | + | 2045 | AGGAAGATGGCATTTCTAGTTT | GGAG | 50 |
| | 9KH | 9KH22 | | | | | | | |
| 51 | SLUCAS | E51SLCas | 31774112 | 31774138 | + | 177 | AGATGGCATTTCTAGTTTGGAG | ATGG | 10 |
| | 9KH | 9KH23 | | | | | | | |
| 51 | SLUCAS | E51SLCas | 31774115 | 31774141 | + | 2046 | TGGCATTTCTAGTTTGGAGATG | GCAG | 22 |
| | 9KH | 9KH24 | | | | | | | |
| 51 | SLUCAS | E51SLCas | 31774124 | 31774150 | + | 2047 | TAGTTTGGAGATGGCAGTTTCC | TTAG | 20 |
| | 9KH | 9KH25 | | | | | | | |
| 51 | SLUCAS | E51SLCas | 31774133 | 31774159 | + | 2048 | GATGGCAGTTTCCTTAGTAACC | ACAG | 11 |
| | 9KH | 9KH26 | | | | | | | |
| 51 | SLUCAS | E51SLCas | 31774134 | 31774160 | + | 178 | ATGGCAGTTTCCTTAGTAACCA | CAGG | 14 |
| | 9KH | 9KH27 | | | | | | | |
| 51 | SLUCAS | E51SLCas | 31774146 | 31774172 | + | 2049 | TTAGTAACCACAGGTTGTGTCA | CCAG | 7 |
| | 9KH | 9KH28 | | | | | | | |
| 51 | SLUCAS | E51SLCas | 31774148 | 31774174 | + | 2050 | AGTAACCACAGGTTGTGTCACC | AGAG | 7 |
| | 9KH | 9KH29 | | | | | | | |
| 51 | SLUCAS | E51SLCas | 31774154 | 31774180 | + | 2051 | CACAGGTTGTGTCACCAGAGTA | ACAG | 14 |
| | 9KH | 9KH30 | | | | | | | |
| 51 | SLUCAS | E51SLCas | 31774160 | 31774186 | + | 2052 | TTGTGTCACCAGAGTAACAGTC | TGAG | 9 |
| | 9KH | 9KH31 | | | | | | | |
| 51 | SLUCAS | E51SLCas | 31774163 | 31774189 | + | 2053 | TGTCACCAGAGTAACAGTCTGA | GTAG | 9 |
| | 9KH | 9KH32 | | | | | | | |
| 51 | SLUCAS | E51SLCas | 31774164 | 31774190 | + | 179 | GTCACCAGAGTAACAGTCTGAG | TAGG | 14 |
| | 9KH | 9KH33 | | | | | | | |
| 51 | SLUCAS | E51SLCas | 31774166 | 31774192 | + | 2054 | CACCAGAGTAACAGTCTGAGTA | GGAG | 11 |
| | 9KH | 9KH34 | | | | | | | |
| 51 | SLUCAS | E51SLCas | 31774180 | 31774206 | + | 180 | TCTGAGTAGGAGCTAAAATATT | TTGG | 11 |
| | 9KH | 9KH35 | | | | | | | |
| 51 | SLUCAS | E51SLCas | 31774181 | 31774207 | + | 181 | CTGAGTAGGAGCTAAAATATTT | TGGG | 21 |
| | 9KH | 9KH36 | | | | | | | |
| 51 | SLUCAS | E51SLCas | 31774194 | 31774220 | + | 2055 | AAAATATTTTGGGTTTTTGCAA | AAAG | 56 |
| | 9KH | 9KH37 | | | | | | | |
| 51 | SLUCAS | E51SLCas | 31774195 | 31774221 | + | 182 | AAATATTTTGGGTTTTTGCAAA | AAGG | 61 |
| | 9KH | 9KH38 | | | | | | | |
| 51 | SLUCAS | E51SLCas | 31773927 | 31773953 | - | 2056 | GAAAAAATGATAAAAGTTGGCA | GAAG | 77 |
| | 9KH | 9KH39 | | | | | | | |
| 51 | SLUCAS | E51SLCas | 31773930 | 31773956 | - | 2057 | TGAGAAAAAATGATAAAAGTTG | GCAG | 124 |
| | 9KH | 9KH40 | | | | | | | |
| 51 | SLUCAS | E51SLCas | 31773933 | 31773959 | - | 183 | GTATGAGAAAAAATGATAAAAG | TTGG | 99 |
| | 9KH | 9KH41 | | | | | | | |
| 51 | SLUCAS | E51SLCas | 31773937 | 31773963 | - | 2058 | GAAGGTATGAGAAAAAATGATA | AAAG | 64 |
| | 9KH | 9KH42 | | | | | | | |
| 51 | SLUCAS | E51SLCas | 31773952 | 31773978 | - | 2059 | GATGATCATCAAGCAGAAGGTA | TGAG | 11 |
| | 9KH | 9KH43 | | | | | | | |
| 51 | SLUCAS | E51SLCas | 31773958 | 31773984 | - | 184 | CAACGAGATGATCATCAAGCAG | AAGG | 7 |
| | 9KH | 9KH44 | | | | | | | |
| 51 | SLUCAS | E51SLCas | 31773959 | 31773985 | - | 2060 | TCAACGAGATGATCATCAAGCA | GAAG | 3 |
| | 9KH | 9KH45 | | | | | | | |
| 51 | SLUCAS | E51SLCas | 31773962 | 31773988 | - | 2061 | ATATCAACGAGATGATCATCAA | GCAG | 7 |
| | 9KH | 9KH46 | | | | | | | |
| 51 | SLUCAS | E51SLCas | 31773965 | 31773991 | - | 2062 | AGGATATCAACGAGATGATCAT | CAAG | 7 |
| | 9KH | 9KH47 | | | | | | | |
| 51 | SLUCAS | E51SLCas | 31773977 | 31774003 | - | 2063 | TGGGTGACCTTGAGGATATCAA | CGAG | 17 |
| | 9KH | 9KH48 | | | | | | | |
| 51 | SLUCAS | E51SLCas | 31773988 | 31774014 | - | 185 | GAGGGTGATGGTGGGTGACCTT | GAGG | 22 |
| | 9KH | 9KH49 | | | | | | | |
| 51 | SLUCAS | E51SLCas | 31773989 | 31774015 | - | 2064 | AGAGGGTGATGGTGGGTGACCT | TGAG | 48 |
| | 9KH | 9KH50 | | | | | | | |
| 51 | SLUCAS | E51SLCas | 31773999 | 31774025 | - | 186 | ATAAAATCACAGAGGGTGATGG | TGGG | 27 |
| | 9KH | 9KH51 | | | | | | | |
| 51 | SLUCAS | E51SLCas | 31774000 | 31774026 | - | 187 | TATAAAATCACAGAGGGTGATG | GTGG | 23 |
| | 9KH | 9KH52 | | | | | | | |
| 51 | SLUCAS | E51SLCas | 31774003 | 31774029 | - | 188 | AGTTATAAAATCACAGAGGGTG | ATGG | 20 |
| | 9KH | 9KH53 | | | | | | | |
| 51 | SLUCAS | E51SLCas | 31774009 | 31774035 | - | 189 | TGATCAAGTTATAAAATCACAG | AGGG | 29 |
| | 9KH | 9KH54 | | | | | | | |
| 51 | SLUCAS | E51SLCas | 31774010 | 31774036 | - | 190 | TTGATCAAGTTATAAAATCACA | GAGG | 30 |
| | 9KH | 9KH55 | | | | | | | |
| 51 | SLUCAS | E51SLCas | 31774011 | 31774037 | - | 2065 | CTTGATCAAGTTATAAAATCAC | AGAG | 14 |
| | 9KH | 9KH56 | | | | | | | |
| 51 | SLUCAS | E51SLCas | 31774013 | 31774039 | - | 2066 | TGCTTGATCAAGTTATAAAATC | ACAG | 11 |
| | 9KH | 9KH57 | | | | | | | |
| 51 | SLUCAS | E51SLCas | 31774027 | 31774053 | - | 2067 | CGACTGGCTTTCTCTGCTTGAT | CAAG | 8 |
| | 9KH | 9KH58 | | | | | | | |
| 51 | SLUCAS | E51SLCas | 31774046 | 31774072 | - | 191 | GGGCTTGGACAGAACTTACCGA | CTGG | 2 |
| | 9KH | 9KH59 | | | | | | | |
| 51 | SLUCAS | E51SLCas | 31774060 | 31774086 | - | 2068 | GGCAGATTTCAACCGGGCTTGG | ACAG | 5 |
| | 9KH | 9KH60 | | | | | | | |
| 51 | SLUCAS | E51SLCas | 31774064 | 31774090 | - | 192 | CTCTGGCAGATTTCAACCGGGC | TTGG | 1 |
| | 9KH | 9KH61 | | | | | | | |
| 51 | SLUCAS | E51SLCas | 31774069 | 31774095 | - | 193 | ACCTGCTCTGGCAGATTTCAAC | CGGG | 10 |
| | 9KH | 9KH62 | | | | | | | |
| 51 | SLUCAS | E51SLCas | 31774070 | 31774096 | - | 194 | TACCTGCTCTGGCAGATTTCAA | CCGG | 10 |
| | 9KH | 9KH63 | | | | | | | |
| 51 | SLUCAS | E51SLCas | 31774081 | 31774107 | - | 2069 | GATGTTGGAGGTACCTGCTCTG | GCAG | 7 |
| | 9KH | 9KH64 | | | | | | | |
| 51 | SLUCAS | E51SLCas | 31774084 | 31774110 | - | 195 | CTTGATGTTGGAGGTACCTGCT | CTGG | 7 |
| | 9KH | 9KH65 | | | | | | | |
| 51 | SLUCAS | E51SLCas | 31774096 | 31774122 | - | 196 | AATGCCATCTTCCTTGATGTTG | GAGG | 22 |
| | 9KH | 9KH66 | | | | | | | |
| 51 | SLUCAS | E51SLCas | 31774097 | 31774123 | - | 2070 | AAATGCCATCTTCCTTGATGTT | GGAG | 19 |
| | 9KH | 9KH67 | | | | | | | |
| 51 | SLUCAS | E51SLCas | 31774099 | 31774125 | - | 197 | AGAAATGCCATCTTCCTTGATG | TTGG | 26 |
| | 9KH | 9KH68 | | | | | | | |
| 51 | SLUCAS | E51SLCas | 31774123 | 31774149 | - | 2071 | TAAGGAAACTGCCATCTCCAAA | CTAG | 41 |
| | 9KH | 9KH69 | | | | | | | |
| 51 | SLUCAS | E51SLCas | 31774144 | 31774170 | - | 198 | GGTGACACAACCTGTGGTTACT | AAGG | 6 |
| | 9KH | 9KH70 | | | | | | | |
| 51 | SLUCAS | E51SLCas | 31774145 | 31774171 | - | 2072 | TGGTGACACAACCTGTGGTTAC | TAAG | 10 |
| | 9KH | 9KH71 | | | | | | | |
| 51 | SLUCAS | E51SLCas | 31774153 | 31774179 | - | 199 | TGTTACTCTGGTGACACAACCT | GTGG | 22 |
| | 9KH | 9KH72 | | | | | | | |
| 51 | SLUCAS | E51SLCas | 31774168 | 31774194 | - | 200 | AGCTCCTACTCAGACTGTTACT | CTGG | 2 |
| | 9KH | 9KH73 | | | | | | | |
| 51 | SLUCAS | E51SLCas | 31774181 | 31774207 | - | 2073 | CCCAAAATATTTTAGCTCCTAC | TCAG | 10 |
| | 9KH | 9KH74 | | | | | | | |
| 51 | SLUCAS | E51SLCas | 31774192 | 31774218 | - | 2074 | TTTTGCAAAAACCCAAAATATT | TTAG | 43 |
| | 9KH | 9KH75 | | | | | | | |
| 53 | SACAS9 | E53SaCas | 31679352 | 31679380 | + | 1056 | AAAAGGTATCTTTGATACTAAC | CTTGGT | 45 |
| | KKH | 9KKH1 | | | | | | | |
| 53 | SACAS9 | E53SaCas | 31679361 | 31679389 | + | 1057 | CTTTGATACTAACCTTGGTTTC | TGTGAT | 20 |
| | KKH | 9KKH2 | | | | | | | |
| 53 | SACAS9 | E53SaCas | 31679373 | 31679401 | + | 25 | CCTTGGTTTCTGTGATTTTCTT | TTGGAT | 122 |
| | KKH | 9KKH3 | | | | | | | |
| 53 | SACAS9 | E53SaCas | 31679477 | 31679505 | + | 26 | TCCTTAGCTTCCAGCCATTGTG | TTGAAT | 42 |
| | KKH | 9KKH4 | | | | | | | |
| 53 | SACAS9 | E53SaCas | 31679510 | 31679538 | + | 1058 | AACATTTCATTCAACTGTTGCC | TCCGGT | 46 |
| | KKH | 9KKH5 | | | | | | | |
| 53 | SACAS9 | E53SaCas | 31679519 | 31679547 | + | 1059 | TTCAACTGTTGCCTCCGGTTCT | GAAGGT | 9 |
| | KKH | 9KKH6 | | | | | | | |
| 53 | SACAS9 | E53SaCas | 31679543 | 31679571 | + | 1060 | AGGTGTTCTTGTACTTCATCCC | ACTGAT | 16 |
| | KKH | 9KKH7 | | | | | | | |
| 53 | SACAS9 | E53SaCas | 31679550 | 31679578 | + | 27 | CTTGTACTTCATCCCACTGATT | CTGAAT | 58 |
| | KKH | 9KKH8 | | | | | | | |
| 53 | SACAS9 | E53SaCas | 31679565 | 31679593 | + | 28 | ACTGATTCTGAATTCTTTCAAC | TAGAAT | 78 |
| | KKH | 9KKH9 | | | | | | | |
| 53 | SACAS9 | E53SaCas | 31679577 | 31679605 | + | 1061 | TTCTTTCAACTAGAATAAAAGG | AAAAAT | 86 |
| | KKH | 9KKH10 | | | | | | | |
| 53 | SACAS9 | E53SaCas | 31679581 | 31679609 | + | 1062 | TTCAACTAGAATAAAAGGAAAA | ATAAAT | 420 |
| | KKH | 9KKH11 | | | | | | | |
| 53 | SACAS9 | E53SaCas | 31679588 | 31679616 | + | 1063 | AGAATAAAAGGAAAAATAAATA | TATAGT | 5266 |
| | KKH | 9KKH12 | | | | | | | |
| 53 | SACAS9 | E53SaCas | 31679346 | 31679374 | - | 1064 | GTTAGTATCAAAGATACCTTTT | TAAAAT | 31 |
| | KKH | 9KKH13 | | | | | | | |
| 53 | SACAS9 | E53SaCas | 31679359 | 31679387 | - | 1065 | CACAGAAACCAAGGTTAGTATC | AAAGAT | 33 |
| | KKH | 9KKH14 | | | | | | | |
| 53 | SACAS9 | E53SaCas | 31679368 | 31679396 | - | 1066 | AAAGAAAATCACAGAAACCAAG | GTTACT | 456 |
| | KKH | 9KKH15 | | | | | | | |
| 53 | SACAS9 | E53SaCas | 31679372 | 31679400 | - | 1067 | TCCAGAAAATCACAGAAAC | CAAGGT | 246 |
| | KKH | 9KKH16 | | | | | | | |
| 53 | SACAS9 | E53SaCas | 31679387 | 31679415 | - | 1068 | ATACAGTAGATGCAATCCAAAA | GAAAAT | 49 |
| | KKH | 9KKH17 | | | | | | | |
| 53 | SACAS9 | E53SaCas | 31679399 | 31679427 | - | 1069 | AGGAGGGTCCCTATACAGTAGA | TGCAAT | 13 |
| | KKH | 9KKH18 | | | | | | | |
| 53 | SACAS9 | E53SaCas | 31679404 | 31679432 | - | 1070 | ATGGAAGGAGGGTCCCTATACA | GTAGAT | 20 |
| | KKH | 9KKH19 | | | | | | | |
| 53 | SACAS9 | E53SaCas | 31679408 | 31679436 | - | 1071 | AGTCATGGAAGGAGGGTCCCTA | TACAGT | 27 |
| | KKH | 9KKH20 | | | | | | | |
| 53 | SACAS9 | E53SaCas | 31679419 | 31679447 | - | 29 | AGCCAAGCTTGAGTCATGGAAG | GAGGGT | 36 |
| | KKH | 9KKH21 | | | | | | | |
| 53 | SACAS9 | E53SaCas | 31679433 | 31679461 | - | 30 | TTAGGACAGGCCAGAGCCAAGC | TTGAGT | 30 |
| | KKH | 9KKH22 | | | | | | | |
| 53 | SACAS9 | E53SaCas | 31679462 | 31679490 | - | 1072 | TGGAAGCTAAGGAAGAAGCTGA | GCAGGT | 103 |
| | KKH | 9KKH23 | | | | | | | |
| 53 | SACAS9 | E53SaCas | 31679493 | 31679521 | - | 1073 | AATGAAATGTTAAAGGATTCAA | CACAAT | 200 |
| | KKH | 9KKH24 | | | | | | | |
| 53 | SACAS9 | E53SaCas | 31679503 | 31679531 | - | 31 | GCAACAGTTGAATGAAATGTTA | AAGGAT | 155 |
| | KKH | 9KKH25 | | | | | | | |
| 53 | SACAS9 | E53SaCas | 31679513 | 31679541 | - | 1074 | AGAACCGGAGGCAACAGTTGAA | TGAAAT | 11 |
| | KKH | 9KKH26 | | | | | | | |
| 53 | SACAS9 | E53SaCas | 31679518 | 31679546 | - | 32 | CCTTCAGAACCGGAGGCAACAG | TTGAAT | 8 |
| | KKH | 9KKH27 | | | | | | | |
| 53 | SACAS9 | E53SaCas | 31679523 | 31679551 | - | 1075 | GAACACCTTCAGAACCGGAGGC | AACAGT | 10 |
| | KKH | 9KKH28 | | | | | | | |
| 53 | SACAS9 | E53SaCas | 31679555 | 31679583 | - | 1076 | AAAGAATTCAGAATCAGTGGGA | TGAAGT | 106 |
| | KKH | 9KKH29 | | | | | | | |
| 53 | SACAS9 | E53SaCas | 31679560 | 31679588 | - | 33 | ACTTGAAAGAATTCAGAATCAG | TGGGAT | 110 |
| | KKH | 9KKH30 | | | | | | | |
| 53 | SACAS9 | E53SaCas | 31679565 | 31679593 | - | 1077 | ATTCTAGTTGAAAGAATTCAGA | ATCAGT | 134 |
| | KKH | 9KKH31 | | | | | | | |
| 53 | SACAS9 | E53SaCas | 31679569 | 31679597 | - | 34 | TTTTATTCTAGTTGAAAGAATT | CAGAAT | 399 |
| | KKH | 9KKH32 | | | | | | | |
| 53 | SACAS9 | E53SaCas | 31679576 | 31679604 | - | 35 | TTTTTCCTTTTATTCTAGTTGA | AAGAAT | 475 |
| | KKH | 9KKH33 | | | | | | | |
| 53 | SACAS9 | E53SaCas | 31679585 | 31679613 | - | 1078 | ATATATTTATTTTTCCTTTTAT | TCTAGT | 2133 |
| | KKH | 9KKH34 | | | | | | | |
| 53 | SLUCAS | E53SLCas | 31679353 | 31679379 | + | 201 | AAAGGTATCTTTGATACTAACC | TTGG | 13 |
| | 9KH | 9KH1 | | | | | | | |
| 53 | SLUCAS | E53SLCas | 31679373 | 31679399 | + | 202 | CCTTGGTTTCTGTGATTTTCTT | TTGG | 51 |
| | 9KH | 9KH2 | | | | | | | |
| 53 | SLUCAS | E53SLCas | 31679391 | 31679417 | + | 2075 | TCTTTTGGATTGCATCTACTGT | ATAG | 18 |
| | 9KH | 9KH3 | | | | | | | |
| 53 | SLUCAS | E53SLCas | 31679392 | 31679418 | + | 203 | CTTTTGGATTGCATCTACTGTA | TAGG | 12 |
| | 9KH | 9KH4 | | | | | | | |
| 53 | SLUCAS | E53SLCas | 31679393 | 31679419 | + | 204 | TTTTGGATTGCATCTACTGTAT | AGGG | 15 |
| | 9KH | 9KH5 | | | | | | | |
| 53 | SLUCAS | E53SLCas | 31679414 | 31679440 | + | 2076 | TAGGGACCCTCCTTCCATGACT | CAAG | 11 |
| | 9KH | 9KH6 | | | | | | | |
| 53 | SLUCAS | E53SLCas | 31679419 | 31679445 | + | 205 | ACCCTCCTTCCATGACTCAAGC | TTGG | 11 |
| | 9KH | 9KH7 | | | | | | | |
| 53 | SLUCAS | E53SLCas | 31679425 | 31679451 | + | 206 | CTTCCATGACTCAAGCTTGGCT | CTGG | 10 |
| | 9KH | 9KH8 | | | | | | | |
| 53 | SLUCAS | E53SLCas | 31679436 | 31679462 | + | 2077 | CAAGCTTGGCTCTGGCCTGTCC | TAAG | 16 |
| | 9KH | 9KH9 | | | | | | | |
| 53 | SLUCAS | E53SLCas | 31679446 | 31679472 | + | 2078 | TCTGGCCTGTCCTAAGACCTGC | TCAG | 18 |
| | 9KH | 9KH10 | | | | | | | |
| 53 | SLUCAS | E53SLCas | 31679458 | 31679484 | + | 2079 | TAAGACCTGCTCAGCTTCTTCC | TTAG | 16 |
| | 9KH | 9KH11 | | | | | | | |
| 53 | SLUCAS | E53SLCas | 31679465 | 31679491 | + | 2080 | TGCTCAGCTTCTTCCTTAGCTT | CCAG | 24 |
| | 9KH | 9KH12 | | | | | | | |
| 53 | SLUCAS | E53SLCas | 31679511 | 31679537 | + | 207 | ACATTTCATTCAACTGTTGCCT | CCGG | 15 |
| | 9KH | 9KH13 | | | | | | | |
| 53 | SLUCAS | E53SLCas | 31679519 | 31679545 | + | 2081 | TTCAACTGTTGCCTCCGGTTCT | GAAG | 6 |
| | 9KH | 9KH14 | | | | | | | |
| 53 | SLUCAS | E53SLCas | 31679520 | 31679546 | + | 208 | TCAACTGTTGCCTCCGGTTCTG | AAGG | 4 |
| | 9KH | 9KH15 | | | | | | | |
| 53 | SLUCAS | E53SLCas | 31679564 | 31679590 | + | 2082 | CACTGATTCTGAATTCTTTCAA | CTAG | 32 |
| | 9KH | 9KH16 | | | | | | | |
| 53 | SLUCAS | E53SLCas | 31679572 | 31679598 | + | 2083 | CTGAATTCTTTCAACTAGAATA | AAAG | 71 |
| | 9KH | 9KH17 | | | | | | | |
| 53 | SLUCAS | E53SLCas | 31679573 | 31679599 | + | 209 | TGAATTCTTTCAACTAGAATAA | AAGG | 48 |
| | 9KH | 9KH18 | | | | | | | |
| 53 | SLUCAS | E53SLCas | 31679589 | 31679615 | + | 2084 | GAATAAAAGGAAAAATAAATAT | ATAG | 574 |
| | 9KH | 9KH19 | | | | | | | |
| 53 | SLUCAS | E53SLCas | 31679592 | 31679618 | + | 2085 | TAAAAGGAAAAATAAATATATA | GTAG | 765 |
| | 9KH | 9KH20 | | | | | | | |
| 53 | SLUCAS | E53SLCas | 31679361 | 31679387 | - | 2086 | CACAGAAACCAAGGTTAGTATC | AAAG | 6 |
| | 9KH | 9KH21 | | | | | | | |
| 53 | SLUCAS | E53SLCas | 31679369 | 31679395 | - | 2087 | AAGAAAATCACAGAAACCAAGG | TTAG | 88 |
| | 9KH | 9KH22 | | | | | | | |
| 53 | SLUCAS | E53SLCas | 31679373 | 31679399 | - | 210 | CCAAAAGAAAATCACAGAAACC | AAGG | 52 |
| | 9KH | 9KH23 | | | | | | | |
| 53 | SLUCAS | E53SLCas | 31679374 | 31679400 | - | 2088 | TCCAAAAGAAAATCACAGAAAC | CAAG | 75 |
| | 9KH | 9KH24 | | | | | | | |
| 53 | SLUCAS | E53SLCas | 31679382 | 31679408 | - | 2089 | AGATGCAATCCAAAAGAAAATC | ACAG | 89 |
| | 9KH | 9KH25 | | | | | | | |
| 53 | SLUCAS | E53SLCas | 31679392 | 31679418 | - | 2090 | CCTATACAGTAGATGCAATCCA | AAAG | 4 |
| | 9KH | 9KH26 | | | | | | | |
| 53 | SLUCAS | E53SLCas | 31679406 | 31679432 | - | 2091 | ATGGAAGGAGGGTCCCTATACA | GTAG | 8 |
| | 9KH | 9KH27 | | | | | | | |
| 53 | SLUCAS | E53SLCas | 31679409 | 31679435 | - | 2092 | GTCATGGAAGGAGGGTCCCTAT | ACAG | 12 |
| | 9KH | 9KH28 | | | | | | | |
| 53 | SLUCAS | E53SLCas | 31679420 | 31679446 | - | 211 | GCCAAGCTTGAGTCATGGAAGG | AGGG | 10 |
| | 9KH | 9KH29 | | | | | | | |
| 53 | SLUCAS | E53SLCas | 31679421 | 31679447 | - | 212 | AGCCAAGCTTGAGTCATGGAAG | GAGG | 21 |
| | 9KH | 9KH30 | | | | | | | |
| 53 | SLUCAS | E53SLCas | 31679422 | 31679448 | - | 2093 | GAGCCAAGCTTGAGTCATGGAA | GGAG | 14 |
| | 9KH | 9KH31 | | | | | | | |
| 53 | SLUCAS | E53SLCas | 31679424 | 31679450 | - | 213 | CAGAGCCAAGCTTGAGTCATGG | AAGG | 18 |
| | 9KH | 9KH32 | | | | | | | |
| 53 | SLUCAS | E53SLCas | 31679425 | 31679451 | - | 2094 | CCAGAGCCAAGCTTGAGTCATG | GAAG | 18 |
| | 9KH | 9KH33 | | | | | | | |
| 53 | SLUCAS | E53SLCas | 31679428 | 31679454 | - | 214 | AGGCCAGAGCCAAGCTTGAGTC | ATGG | 23 |
| | 9KH | 9KH34 | | | | | | | |
| 53 | SLUCAS | E53SLCas | 31679434 | 31679460 | - | 2095 | TAGGACAGGCCAGAGCCAAGCT | TGAG | 17 |
| | 9KH | 9KH35 | | | | | | | |
| 53 | SLUCAS | E53SLCas | 31679440 | 31679466 | - | 2096 | AGGTCTTAGGACAGGCCAGAGC | CAAG | 23 |
| | 9KH | 9KH36 | | | | | | | |
| 53 | SLUCAS | E53SLCas | 31679445 | 31679471 | - | 2097 | TGAGCAGGTCTTAGGACAGGCC | AGAG | 27 |
| | 9KH | 9KH37 | | | | | | | |
| 53 | SLUCAS | E53SLCas | 31679447 | 31679473 | - | 2098 | GCTGAGCAGGTCTTAGGACAGG | CCAG | 35 |
| | 9KH | 9KH38 | | | | | | | |
| 53 | SLUCAS | E53SLCas | 31679451 | 31679477 | - | 215 | AGAAGCTGAGCAGGTCTTAGGA | CAGG | 44 |
| | 9KH | 9KH39 | | | | | | | |
| 53 | SLUCAS | E53SLCas | 31679452 | 31679478 | - | 2099 | AAGAAGCTGAGCAGGTCTTAGG | ACAG | 16 |
| | 9KH | 9KH40 | | | | | | | |
| 53 | SLUCAS | E53SLCas | 31679456 | 31679482 | - | 216 | AAGGAAGAAGCTGAGCAGGTCT | TAGG | 53 |
| | 9KH | 9KH41 | | | | | | | |
| 53 | SLUCAS | E53SLCas | 31679457 | 31679483 | - | 2100 | TAAGGAAGAAGCTGAGCAGGTC | TTAG | 25 |
| | 9KH | 9KH42 | | | | | | | |
| 53 | SLUCAS | E53SLCas | 31679463 | 31679489 | - | 217 | GGAAGCTAAGGAAGAAGCTGAG | CAGG | 70 |
| | 9KH | 9KH43 | | | | | | | |
| 53 | SLUCAS | E53SLCas | 31679464 | 31679490 | - | 2101 | TGGAAGCTAAGGAAGAAGCTGA | GCAG | 52 |
| | 9KH | 9KH44 | | | | | | | |
| 53 | SLUCAS | E53SLCas | 31679467 | 31679493 | - | 2102 | GGCTGGAAGCTAAGGAAGAAGC | TGAG | 41 |
| | 9KH | 9KH45 | | | | | | | |
| 53 | SLUCAS | E53SLCas | 31679472 | 31679498 | - | 2103 | ACAATGGCTGGAAGCTAAGGAA | GAAG | 27 |
| | 9KH | 9KH46 | | | | | | | |
| 53 | SLUCAS | E53SLCas | 31679475 | 31679501 | - | 2104 | AACACAATGGCTGGAAGCTAAG | GAAG | 18 |
| | 9KH | 9KH47 | | | | | | | |
| 53 | SLUCAS | E53SLCas | 31679478 | 31679504 | - | 218 | TTCAACACAATGGCTGGAAGCT | AAGG | 87 |
| | 9KH | 9KH48 | | | | | | | |
| 53 | SLUCAS | E53SLCas | 31679479 | 31679505 | - | 2015 | ATTCAACACAATGGCTGGAAGC | TAAG | 24 |
| | 9KH | 9KH49 | | | | | | | |
| 53 | SLUCAS | E53SLCas | 31679484 | 31679510 | - | 2016 | AAAGGATTCAACACAATGGCTG | GAAG | 12 |
| | 9KH | 9KH50 | | | | | | | |
| 53 | SLUCAS | E53SLCas | 31679487 | 31679513 | - | 219 | GTTAAAGGATTCAACACAATGG | CTGG | 12 |
| | 9KH | 9KH51 | | | | | | | |
| 53 | SLUCAS | E53SLCas | 31679491 | 31679517 | - | 220 | AAATGTTAAAGGATTCAACACA | ATGG | 37 |
| | 9KH | 9KH52 | | | | | | | |
| 53 | SLUCAS | E53SLCas | 31679505 | 31679531 | - | 221 | GCAACAGTTGAATGAAATGTTA | AAGG | 28 |
| | 9KH | 9KH53 | | | | | | | |
| 53 | SLUCAS | E53SLCas | 31679506 | 31679532 | - | 2107 | GGCAACAGTTGAATGAAATGTT | AAAG | 25 |
| | 9KH | 9KH54 | | | | | | | |
| 53 | SLUCAS | E53SLCas | 31679524 | 31679550 | - | 2108 | AACACCTTCAGAACCGGAGGCA | ACAG | 7 |
| | 9KH | 9KH55 | | | | | | | |
| 53 | SLUCAS | E53SLCas | 31679530 | 31679556 | - | 222 | TACAAGAACACCTTCAGAACCG | GAGG | 10 |
| | 9KH | 9KH56 | | | | | | | |
| 53 | SLUCAS | E53SLCas | 31679531 | 31679557 | - | 2109 | GTACAAGAACACCTTCAGAACC | GGAG | 10 |
| | 9KH | 9KH57 | | | | | | | |
| 53 | SLUCAS | E53SLCas | 31679533 | 31679559 | - | 223 | AAGTACAAGAACACCTTCAGAA | CCGG | 17 |
| | 9KH | 9KH58 | | | | | | | |
| 53 | SLUCAS | E53SLCas | 31679539 | 31679565 | - | 2110 | GGGATGAAGTACAAGAACACCT | TCAG | 18 |
| | 9KH | 9KH59 | | | | | | | |
| 53 | SLUCAS | E53SLCas | 31679550 | 31679576 | - | 2111 | TCAGAATCAGTGGGATGAAGTA | CAAG | 27 |
| | 9KH | 9KH60 | | | | | | | |
| 53 | SLUCAS | E53SLCas | 31679556 | 31679582 | - | 2112 | AAGAATTCAGAATCAGTGGGAT | GAAG | 27 |
| | 9KH | 9KH61 | | | | | | | |
| 53 | SLUCAS | E53SLCas | 31679562 | 31679588 | - | 224 | AGTTGAAAGAATTCAGAATCAG | TGGG | 95 |
| | 9KH | 9KH62 | | | | | | | |
| 53 | SLUCAS | E53SLCas | 31679563 | 31679589 | - | 225 | TAGTTGAAAGAATTCAGAATCA | GTGG | 33 |
| | 9KH | 9KH63 | | | | | | | |
| 53 | SLUCAS | E53SLCas | 31679566 | 31679592 | - | 2113 | TTCTACTTGAAAGAATTCAGAA | TCAG | 43 |
| | 9KH | 9KH64 | | | | | | | |
| 53 | SLUCAS | E53SLCas | 31679572 | 31679598 | - | 2114 | CTTTTATTCTAGTTGAAAGAAT | TCAG | 61 |
| | 9KH | 9KH65 | | | | | | | |
| 53 | SLUCAS | E53SLCas | 31679579 | 31679605 | - | 2115 | ATTTTTCCTTTTATTCTAGTTG | AAAG | 122 |
| | 9KH | 9KH66 | | | | | | | |
| 53 | SLUCAS | E53SLCas | 31679586 | 31679612 | - | 2116 | TATATTTATTTTTCCTTTTATT | CTAG | 978 |
| | 9KH | 9KH67 | | | | | | | |

### Example 4: Evaluation of sgRNA Pairs

[0710] A. Materials and Methods

[0711] 1. sgRNA Selection

[0712] A subset of SaCas9-KKH or SluCas9 sgRNAs found within the DMD gene was selected for indel frequency and profile evaluation. The criteria used to select these sgRNAs included their potential to induce exon reframing and or skipping as a pair, in addition to the existence of a mouse, dog and NHP homologue counterpart. This selection included 27 sgRNAs located within exon 45, 39 sgRNAs located within exon 51 and 29 sgRNAs located within exon 53. The number of predicted off target sites was determined for each sgRNA.

[0713] 2. Transfection of HEK293FT Cells

[0714] 293FT cells were transfected in 12-well plates with 750 ng plasmid+2.25 uL of Lipofectamine 2000. Three days after transfection, cells were trypsinized and sorted for GFP. GFP-positive cells were sorted directly into lysis buffer, and DNA extraction was performed using the Promega Maxwell RSC Blood DNA Kit. PCR was then performed on the DNA using exon-specific primers that targeted the relevant cut site.

[0715] 3. Amplicon Deep Sequencing Library Preparation and Data Analysis

[0716] The relevant loci for each exon were amplified by PCR and the products were used to prepare sequencing libraries using MiSeq reagent kit V3 600 cycle. Indel analysis was performed using CRISPResso2±10-nt quantification window. Indel profiling consisted of 8 indel categories listed in Table 6.

TABLE 6

| | | |
|---|---|---|
| Indel group | Ranking order | Definition |

Wild-type amplicon

| | | |
|---|---|---|
| NE | 1 | insertion = 0 & deletion = 0 |
| RF + 1 | 2 | 1-nt insertion at a reframe guide |
| RF Other | 3 | 3n + 1 deletion within the exon |
| | | boundary at the only reframe guide \| no |
| | | edits at the exon guide |
| | | aggregated 3n + 1 deletion within the |
| | | exon boundary at the two reframe guides |
| | | <17-nt insertion at the only reframe |
| | | guide \| no edits at the exon guide |
| | | <17-nt aggregated 3n + 1 insertion at the |
| | | two reframe guides |
| Exon | 4 | indels overlap with the splice acceptor |
| skipping | | (AG) (5′-end of the target exon) |
| | | deletion with ≥ 9-nt overlap with the |
| | | splicing window at one of the two guides |
| | | insertion at the exact GT/AG splicing sites |
| | | and with length ≥ 9-nt at one of the two |
| | | guides |
| OE | 5 | Other indels |

Deletion amplicon

| | | |
|---|---|---|
| Precise | 1 | segmental deletion between the two cut |
| deletion | | sites |
| (Rest) | 2 | SingleCut indel profiling with 3n phase |

Inversion amplicon

| | | |
|---|---|---|
| OE | 1 | all indels |

[0717] 4. AAV Configurations for the Dual Cut Single Vector Candidates

[0718] A combination of promoter orientations, promoter configurations, NLSs and scaffolds were selected for generating AAV plasmids and evaluation on sgRNA transgene expression, AAV manufacturability, and editing efficiency in vitro and in vivo. AAV plasmid configurations listed in Table 7. Promoter, NLS and scaffold sequences listed in Table 8.

TABLE 7

| Pol III | | | | | | | |
|---|---|---|---|---|---|---|---|
| Promoter | Orientation | Configuration | NLS1 | Endonuclease | NLS2 | NLS3 | Scaffold |
| hU6c:hU6c | ← [symbol] → | hU6c-Cas9- | c-Myc- | SluCas9 | SV-40-GSGS | Nucleoplasmin- | V5 |
| | | hU6c | GSVD | | | GSGS | |
| | ← [symbol] → | hU6c-Cas9- | c-Myc- | SaCas9-KKH | SV-40-GSGS | Nucleoplasmin- | V2 |
| | | hU6c | GSVD | | | GSGS | |
| | ← [symbol] → | hU6c-Cas9- | c-Myc- | SluCas9 | SV-40-MCS- | Nucleoplasmin- | V5 |
| | | hU6c | GSVD | | GSGS | GSGS | |
| | ← [symbol] → | hU6c-Cas9- | c-Myc- | SaCas9-KKH | SV-40-MCS- | Nucleoplasmin- | V2 |
| | | hU6c | GSVD | | GSGS | GSGS | |
| hU6:7SK2 | ← [symbol] → | hU6c-Cas9- | c-Myc- | SluCas9 | SV-40-GSGS | Nucleoplasmin- | V5 |
| | | 7SK2 | GSVD | | | GSGS | |
| | ← [symbol] → | hU6c-Cas9- | c-Myc- | SaCas9-KKH | SV-40-GSGS | Nucleoplasmin- | V2 |
| | | 7SK2 | GSVD | | | GSGS | |
| | ← [symbol] → | hU6c-Cas9- | c-Myc- | SluCas9 | SV-40-MCS- | Nucleoplasmin- | V5 |
| | | 7SK2 | GSVD | | GSGS | GSGS | |
| | ← [symbol] → | hU6c-Cas9- | c-Myc- | SaCas9-KKH | SV-40-MCS- | Nucleoplasmin- | V2 |
| | | 7SK2 | GSVD | | GSGS | GSGS | |
| hU6c:H1m | ← [symbol] → | hU6c-Cas9- | c-Myc- | SluCas9 | SV-40-GSGS | Nucleoplasmin- | V5 |
| | | H1m | GSVD | | | GSGS | |
| | ← [symbol] → | hU6c-Cas9- | c-Myc- | SaCas9-KKH | SV-40-GSGS | Nucleoplasmin- | V2 |
| | | H1m | GSVD | | | GSGS | |
| 7SK2:H1m | ← [symbol] → | 7SK2-Cas9- | SV-40- | SluCas9 | Nucleoplasmin | N/A | V5 |
| | | H1m | GS | | | | |
| | ← [symbol] → | 7SK2-Cas9- | SV-40- | SaCas9-KKH | Nucleoplasmin | N/A | V2 |
| | | H1m | GS | | | | |
| | ← [symbol] → | 7SK2-Cas9- | SV-40 | SluCas9 | Nucleoplasmin | N/A | V5 |
| | | H1m | (+) | | | | |
| | ← [symbol] → | 7SK2-Cas9- | SV-40 | SaCas9-KKH | Nucleoplasmin | N/A | V2 |
| | | H1m | (+) | | | | |
| | ← [symbol] → | 7SK2-Cas9- | c-Myc- | SluCas9 | SV-40-MCS- | Nucleoplasmin- | V5 |
| | | H1m | GSVD | | GSGS | GSGS | |
| | ← [symbol] → | 7SK2-Cas9- | c-Myc- | SaCas9-KKH | SV-40-MCS- | Nucleoplasmin- | V2 |
| | | H1m | GSVD | | GSGS | GSGS | |
| | ← [symbol] → | 7SK2-Cas9- | c-Myc- | SluCas9 | SV-40-MCS- | Nucleoplasmin- | V2 |
| | | H1m | GSVD | | GSGS | GSGS | |
| H1m:M11 | ← [symbol] → | H1m-Cas9- | c-Myc- | SluCas9 | SV-40-MCS- | Nucleoplasmin- | V5 |
| | | M11 | GSVD | | GSGS | GSGS | |
| | ← [symbol] → | H1m-Cas9- | c-Myc- | SaCas9-KKH | SV-40-MCS- | Nucleoplasmin- | V5 |
| | | M11 | GSVD | | GSGS | GSGS | |

TABLE 8

| Promoter | Sequences |
|---|---|
| hU6c | GAGGGCCTATTTCCCATGATTCCTTCATATTT |
| | GCATATACGATACAAGGCTGTTAGAGAGATAA |
| | TTGGAATTAATTTGACTGTAAACACAAAGATA |
| | TTAGTACAAAATACGTGACGTAGAAAGTAATA |
| | ATTTCTTGGGTAGTTTGCAGTTTTAAAATTAT |
| | GTTTTAAAATGGACTATCATATGCTTACCGTA |
| | ACTTGAAAGTATTTCGATTTCTTGGCTTTATA |
| | TATCTTGTGGAAAGGACGAAACACC |
| | (SEQ ID NO: 705) |
| 7SK2 | CTGCAGTATTTAGCATGCCCCACCCATCTGCA |
| | AGGCATTCTGGATAGTGTCAAAACAGCCGGAA |
| | ATCAAGTCCGTTTATCTCAAACTTTAGCATTT |
| | TGGGAATAAATGATATTTGCTATGCTGGTTAA |
| | ATTAGATTTTAGTTAAATTTCCTGCTGAAGCT |
| | CTAGTACGATAAGCAACTTGACCTAAGTGTAA |
| | AGTTGAGACTTCCTTCAGGTTTATATAGCTTG |
| | TGCGCCGCTTGGGTACCTC |
| | (SEQ ID NO: 706) |
| H1m | AATATTTGCATGTCGCTATGTGTTCTGGGAAA |
| | TCACCATAAACGTGAAATGTCTTTGGATTTGG |
| | GAATCTTATAAGTTCTGTATGAGACCACTCTT |
| | TCCC |
| | (SEQ ID NO: 707) |
| M11 | ATATTTAGCATGTCGCTATGTGTTCTGGGAAA |
| | CTTGACCTAAGTGTAAAGTTGAGATTTCCTTC |
| | AGGTTTATATAGTTCTGTATGAGACCACTCTT |
| | TCCC |
| | (SEQ ID NO: 708) |
| NLS-linker | AA Sequences |
| c-Myc-GSVD | PAAKKKKLDGSVD (SEQ ID NO: 36) |
| SV-40-GS | PKKKRKVGS (SEQ ID NO: 37) |
| SV-40 (+) | PKKKRKVGIHGVPAA (SEQ ID NO: 38) |
| SV-40-GSGS | GSGSPKKKRKV (SEQ ID NO: 39) |
| SV-40- | TGGGPGGGAAAGSGSPKKKRKV |
| MCS-GSGS | (SEQ ID NO: 40) |
| Nucleoplasmin- | GSGSKRPAATKKAGQAKKKK |
| GSGS | (SEQ ID NO: 41) |
| Scaffold | Sequences |
| SluCas9 | GUUUCAGUACUCUGGAAACAGAAUCUACUGAA |
| scaffold V5 | ACAAGACAAUAUGUCGUGUUUAUCCCAUCAAU |
| | UUAUUGGUGGGAU |
| | (SEQ ID NO: 922) |
| SluCas9 | GTTTAAGTACTCTGTGCTGGAAACAGCACAGA |
| scaffold V2 | ATCTACTTAAACAAGGCAAAATGCCGTGTTTA |
| | TCTCGTCAACTTGTTGGCGAGA |
| | (SEQ ID NO: 500) |

[0719] Sequences of selected primers used for amplification of the specific human locus containing the sgRNA sites are shown in Table 9.

TABLE 9

| Name | Sequence |
|---|---|
| MiSeq_hE45_F | TCGTCGGCAGCGTCAGATGTGTATAAGAG |
| | ACAGGTCTTTCTGTCTTGTATCCTTTGG |
| | (SEQ ID NO: 724) |
| MiSeq_hE45_R | GTCTCGTGGGCTCGGAGATGTGTATAAGA |
| | GACAGAATGTTAGTGCCTTTCACCC |
| | (SEQ ID NO: 725) |
| TIDE_hE45_F* | GTCTTTCTGTCTTGTATCCTTTGG |
| | (SEQ ID NO: 726) |

*TIDE_hE45_F is used for Sanger sequencing.

[0720] 5. Results

[0721] A set of sgRNAs found within the DMD gene was selected for evaluation of indel frequency and profile. Among this selection, 27 sgRNAs were located within exon 45, 39 sgRNAs were located within exon 51 and 29 sgRNAs were located within exon 53. To evaluate indel frequency and editing profiles, plasmid transfection was performed in HEK293FT (FIG. 6B) and Neuro-2a cell lines (FIG. 6D). The average indel frequency of sgRNAs targeting exon 45 was determined in HEK293FT cells (FIG. 6B) and in Neuro-2a cells (FIG. 6D), with a high-performing SpCas9 sgRNA (E45Sp52) included as a reference. Of these, 20 sgRNAs pairs showed an average total indel frequency higher than 60% and 9 sgRNA pairs showed an average precise segmental deletion frequency higher than 50% in 293FT cells. Five sgRNAs tested in the Neuro-2a cell line showed an average precise segmental deletion frequency higher than 40% (FIG. 6D). With regard to indel profile, sgRNA pairs E45SaKKH10/20, E45Slu21/7 and E45Slu18/4 were found to have the highest percent of precise segmental deletion that could lead to potential exon reframing in 293FT cells (FIG. 6B), and sgRNA pairs E45SaKKH10/23, E45Slu17/22, E45Slu17/23 and E45Slu19/21 were found to have the highest percent of precise segmental deletion that could lead to potential exon reframing in Neuro-2a cells (FIG. 6D). Table 10 shows the SEQ ID NOs corresponding to the sgRNA identifiers in FIGS. 6B and 6C.

TABLE 10

| sgRNA identifier | |
|---|---|
| in certain | |
| Figures, including | |
| FIG. 6 and FIG. 8 | SEQ ID NO(s) |
| SaCas9: 2 and 7 | 10 and 15 |
| SaCas9: 2 and 8 | 10 and 16 |
| SaCas9: 4 and 8 | 12 and 16 |
| SaCas9-KKH: 2 and 9 | 1001 and 1005 |
| SaCas9-KKH: 2 and 26 | 1001 and 15 |
| SaCas9-KKH: 2 and 27 | 1001 and 16 |
| SaCas9-KKH: 7 and 9 | 1003 and 1005 |
| SaCas9-KKH: 27 and 7 | 16 and 1003 |
| SaCas9-KKH: 10 and 16 | 12 and 1010 |
| SaCas9-KKH: 10 and 18 | 12 and 1012 |
| SaCas9-KKH: 10 and 20 | 12 and 1013 |
| SaCas9-KKH: 10 and 23 | 10 and 1016 |
| SaCas9-KKH: 24 and 9 | 1017 and 1005 |
| SaCas9-KKH: 24 and 27 | 1017 and 16 |
| SaCas9-KKH: 25 and 27 | 1018 and 16 |
| SluCas9: 21 and 7 | 148 and 134 |
| SluCas9: 22 and 8 | 149 and 135 |
| SluCas9: 23 and 8 | 150 and 135 |
| SluCas9: 4 and 9 | 131 and 136 |
| SluCas9: 24 and 9 | 151 and 136 |
| SluCas9: 12 and 4 | 139 and 131 |
| SluCas9: 12 and 24 | 139 and 151 |
| SluCas9: 13 and 4 | 140 and 131 |
| SluCas9: 13 and 24 | 140 and 151 |
| SluCas9: 14 and 21 | 141 and 148 |
| SluCas9: 17 and 22 | 144 and 149 |
| SluCas9: 17 and 23 | 144 and 150 |
| SluCas9: 18 and 4 | 145 and 131 |
| SluCas9: 18 and 24 | 145 and 151 |
| SluCas9: 19 and 21 | 146 and 148 |
| SaCas9-4 | 12 |
| SluCas9-24 | 151 |
| EX-145 | SpCas9 control |
| | (ATCTTACAGGAACTCCAGGA) |
| | (SEQ ID NO: 727) |

### Example 5: Testing of sgRNA Scaffold Sequences

[0722] 1. Materials and Methods

[0723] Primary human skeletal muscle myoblasts (HsMM; Lonza CC-2580: lot #20TL070666, P0) were recovered and passaged in SkBM®-2 Skeletal Muscle Myoblast Basal Medium plus SkGM®-2 SingleQuots (CC-3246, CC-3244; Lonza) in the incubator at 37° C. with 5% CO2. When HsMM culture reached approximately 80% to 90% confluence and were actively proliferating, the cells were harvested for SluCas9 ribonucleoprotein (RNP) delivery. After thawing, the cells were passaged once before SluCas9 RNP delivery.

[0724] To form SluCas9 RNPs, the appropriate amount of synthetic sgRNA (Synthego: SO #7292552) and recombinant SluCas9 protein (Aldevron: Lot #M22536-01) were mixed in supplemented P5 Primary Cell nucleofection solution (Lonza V4XP-5032). In total, three sgRNA:SluCas9 doses were tested, including a low dose with 37.5 pmol:6.25 pmol, a middle dose 75 pmol:12.5 pmol, and a high dose 150:25. The sgRNAs and SluCas9 proteins were incubated for at least 10 minutes at room temperature for Cas9-sgRNA RNP formation.

[0725] While the SluCas9 RNP was forming, HsMMs were rinsed with HEPES buffered saline solution, dissociated from tissue culture flasks by trypsin, and centrifuge at 90×g for 10 minutes. The cell pellets were resuspended in fresh, pre-warmed, complete growth medium. The number of cells were counted. Appropriate number of cells were transfer into a new centrifuge tube, pelleted by centrifugation at 90×g for 10 minutes, and resuspended in supplemented nucleofection solution. About 200,000 cells in 15 μl nucleofection solution were mixed with about 7 μl of preformed SluCas9:sgRNA RNP complex.

[0726] Approximately 20 μl of the cell and RNP mix were transferred into a 16-well nucleofection strip tube, and then nucleofected with the DS-158 program in a 4D-Nucleofector (Lonza) Immediately after nucleofection, about 80 μl pre-warmed media were added into the each nucleocuvette and incubated at 37 degrees for 10 minutes. The contents (100 μl) of each nucleocuvette were transferred into one well in a 12-well plate filled with 2 ml media and incubated at 37 degrees for 48 hours.

[0727] To determine cell viability 48 hours after nucleofection, the cells were stained with Hoechst and Propidium Iodide (Life Technologies). Cell viability was then assessed using ImageXpress Micro (Molecular Devices). In general, samples with an overall cell viability above 70% were harvested and analyzed for indel analysis.

[0728] To isolate genomic DNA from HsMMs, the cells were washed with saline buffer, trypsinized and centrifuged. The cell pellets were treated with lysis buffer from the Maxwell RSC Blood DNA Kit (Promega #AS1400), and genomic DNAs were extracted using a Maxwell® RSC48 instrument (Promega #AS8500) according to the manufacturer's instruction. The concentrations of genomic DNAs were determined using Qubit™ 1× dsDNA HS Assay Kit (Thermo Fisher Scientific Q33231) according to the manufacturer's instruction.

[0729] To determine the gene editing efficiency, the genomic DNAs were amplified using primers flanking the DMD exon 45 genomic region. The following primer sequences were used: MiSeq_hE45_F TCGTCGGCAGCGTCAGATGTGTATAAGAGACAGgtattctgtettgtatcctttgg (SEQ ID NO: 724) and MiSeq_hE45_R GTCTCGTGGGCTCGGAGATGTGTATAAGAGACAGaatgttagtgcctttcaccc (SEQ ID NO: 725). The size of the amplicons was verified by analyze a small amount of the PCR products on 2% E-gels (Thermo Fisher Scientific). A portion of the PCR product and the forward primer were then sent for sanger sequencing at Genewiz.

[0730] The sequencing results that pass the quality filter were used to determine editing efficiency and indel profile using the TIDE (Tracking of Indels by DEcomposition) algorithm. The following version of the algorithm was used for analysis https://shiny.vrtx.com/app/orrj/tide/ with the appropriate sgRNA sequence, the default analysis parameters, and a mock nucleofected sample as the control. Percentage of other insertions and deletions that have the potential to restore the reading frame of particular DMD patient mutations of interest were referred to as “RF other”. This represents the sum of 2, 5, 8, 11 bp deletions within the alignment window of −20 bp to +20 bp around the Cas9 cut site. The editing efficiency (% mutation) outputs for +1 bp insertion, RF. Other, and other indels from TIDE were then plotted using Prism 9.

[0731] 2. Results

[0732] To optimize and improve gene editing efficiency of the top SluCas9 single-guide RNA (sgRNA) candidates, different sgRNA scaffold sequences were tested in primary human skeletal muscle myoblasts (HsMM) using synthetic sgRNAs as shown in Table 11 below. Two spacer sequences were tested: E45SL23 (SEQ ID NO: 150 (DNA); SEQ ID NO: 930 (RNA)) and E45SL24 (SEQ ID NO: 151 (DNA); SEQ ID NO: 931 (RNA)). Three scaffold sequences were tested: Slu-VCGT-4.5 (SEQ ID NO: 601 (DNA); SEQ ID NO: 918 (RNA)), Slu-VCGT-4 (SEQ ID NO: 917 (DNA); SEQ ID NO: 919 (RNA)), Slu-VCGT-5 (SEQ ID NO: 901 (DNA); SEQ ID NO: 920 (RNA)).

TABLE 11
Exemplary sgRNAs for testing

| | Scaffold | | Spacer | Spacer | SEQ ID | |
|---|---|---|---|---|---|---|
| | (SEQ ID | Scaffold | SEQ | (RNA | NO of | |
| sgRNA ID | NO of RNA) | (RNA version) | ID NO | version) | sgRNA | sgRNA sequence |
| E45SL23- | Slu-VCGT- | GUUUAAGUACUCU | 930 | GGUA | 924 | GGUAUCUUACAGGAA |
| VCGT-4.5 | 4.5 | GUGCUGGAAACAG | | UCUU | | CUCCAGGGUUUAAGU |
| | (SEQ ID | CACAGAAUCUACU | | ACAG | | ACUCUGUGCUGGAAA |
| | NO: 918) | GAAACAAGACAAU | | GAAC | | CAGCACAGAAUCUAC |
| | | AUGUCGUGUUUAU | | UCCA | | UGAAACAAGACAAUA |
| | | CCCAUCAAUUUAU | | GG | | UGUCGUGUUUAUCCC |
| | | UGGUGGGA | | | | AUCAAUUUAUUGGUG |
| | | | | | | GGA |
| E45SL24- | Slu-VCGT- | GUUUAAGUACUCU | 931 | UUUU | 925 | UUUUGGUAUCUUACA |
| VCGT-4.5 | 4.5 | GUGCUGGAAACAG | | GGUA | | GGAACUCGUUUAAGU |
| | (SEQ ID | CACAGAAUCUACU | | UCUU | | ACUCUGUGCUGGAAA |
| | NO: 919) | GAAACAAGACAAU | | ACAG | | CAGCACAGAAUCUAC |
| | | AUGUCGUGUUUAU | | GAAC | | UGAAACAAGACAAUA |
| | | CCCAUCAAUUUAU | | UC | | UGUCGUGUUUAUCCC |
| | | UGGUGGGA | | | | AUCAAUUUAUUGGUG |
| | | | | | | GGA |
| E45SL23- | Slu-VCGT- | GUUUCAGUACUCU | 930 | GGUA | 926 | GGUAUCUUACAGGAA |
| VCGT-4 | 4 | GUGCUGGAAACAG | | UCUU | | CUCCAGGGUUUCAGU |
| | (SEQ ID | CACAGAAUCUACU | | ACAG | | ACUCUGUGCUGGAAA |
| | NO: 920) | GAAACAAGACAAU | | GAAC | | CAGCACAGAAUCUAC |
| | | AUGUCGUGUUUAU | | UCCA | | UGAAACAAGACAAUA |
| | | CCCAUCAAUUUAU | | GG | | UGUCGUGUUUAUCCC |
| | | UGGUGGGAU | | | | AUCAAUUUAUUGGUG |
| | | | | | | GGAU |
| E45SL24- | Slu-VCGT- | GUUUCAGUACUCU | 931 | UUUU | 927 | UUUUGGUAUCUUACA |
| VCGT-4 | 4 | GUGCUGGAAACAG | | GGUA | | GGAACUCGUUUCAGU |
| | (SEQ ID | CACAGAAUCUACU | | UCUU | | ACUCUGUGCUGGAAA |
| | NO: 921) | GAAACAAGACAAU | | ACAG | | CAGCACAGAAUCUAC |
| | | AUGUCGUGUUUAU | | GAAC | | UGAAACAAGACAAUA |
| | | CCCAUCAAUUUAU | | UC | | UGUCGUGUUUAUCCC |
| | | UGGUGGGAU | | | | AUCAAUUUAUUGGUG |
| | | | | | | GGAU |
| E45SL23- | Slu-VCGT- | GUUUcAGUACUCU | 930 | GGUA | 928 | GGUAUCUUACAGGAA |
| VCGT-5 | 5 | GGAAACAGAAUCU | | UCUU | | CUCCAGGGUUUcAGU |
| | (SEQ ID | ACUGAAACAAGAC | | ACAG | | ACUCUGGAAACAGAA |
| | NO: 922) | AAUAUGUCGUGUU | | GAAC | | UCUACUGAAACAAGA |
| | | UAUCCCAUCAAUU | | UCCA | | CAAUAUGUCGUGUUU |
| | | UAUUGGUGGGAU | | GG | | AUCCCAUCAAUUUAU |
| | | | | | | UGGUGGGAU |
| E45SL24- | Slu-VCGT- | GUUUcAGUACUCU | 931 | UUUU | 929 | UUUUGGUAUCUUACA |
| VCGT-5 | 5 | GGAAACAGAAUCU | | GGUA | | GGAACUCGUUUcAGU |
| | (SEQ ID | ACUGAAACAAGAC | | UCUU | | ACUCUGGAAACAGAA |
| | NO: 923) | AAUAUGUCGUGUU | | ACAG | | UCUACUGAAACAAGA |
| | | UAUCCCAUCAAUU | | GAAC | | CAAUAUGUCGUGUUU |
| | | UAUUGGUGGGAU | | UC | | AUCCCAUCAAUUUAU |
| | | | | | | UGGUGGGAU |

[0733] The three scaffold sequences differ by the nucleotide identity, and thus the stem-loop I in RNA secondary structure (FIG. 7A). In addition to differences in stem-loop I, Slu-VCGT-4.5 lacks the last nucleotide U at the 3′ end of Stem 3 (not shown). The results indicate that, Slu-VCGT-5 scaffold produces higher editing efficiency compared to guides with a V4 or V4.5 scaffold in most conditions tested (shown in FIG. 7B).

### Example 6

[0734] 1. Materials and Methods

[0735] Transfection of HEK293FT Cells

[0736] 293FT cells were transfected in 12-well plates with 750 ng plasmid+2.25 μL of Lipofectamine 2000. Three days after transfection, cells were trypsinized and sorted for GFP. GFP-positive cells were sorted directly into lysis buffer, and DNA extraction was performed using the Promega Maxwell RSC Blood DNA Kit. PCR was then performed on the DNA using exon-specific primers that targeted the relevant cut site.

[0737] Transfection of N2a Cells

[0738] N2a (Neuro2a) cells were transfected in 12-well plates after 24-hour of growth with 1000 ng plasmid+3 μL of Lipofectamine 2000. Three days after transfection, cell were trypsinized and sorted for GFP (green fluroescent protein). GFP-positive cells were sorted via FACS (flurorescence-activated cell sorting) directly into lysis buffer, and DNA extraction was performed using the Promega Maxwell RSC Blood DNA Kit. PCR was then performed on the DNA using exon-specific primers that targeted the relevant cut site.

[0739] Amplicon Deep Sequencing Library Preparation for HEK293FT Cells

[0740] Genomic DNA were extracted after sorting for 100 k GFP positive cells and were subjected for amplification by locus specific amplicon. The amplified products were purified by AMPure beads (0.8×) followed by QC with 1% E-gel and concentrations were measured using QuBiT for normalization of samples. Barcoding PCR was carried out with i5 and i7 indices and they were purified by 0.7× AMPure beads followed by QC with Tapestation or 1% E-gel. The barcoded samples were then measured by QuBiT and based on the concentration, the samples were pooled and subjected for library preparation for loading into MiSeq. 8 pM of library was loaded with 20% PhiX spike-in and the output were transferred to the Computational Genomics team for assessing the indel efficiencies for the guides.

[0741] Human Primary Skeletal Muscle Myoblasts (HsMMs) Culture

[0742] On day zero, two frozen vials of HsMMs (lot 20TL070666) was thawed and grown in complete growth media in a 37° C., 5% CO2, humidified incubator in two T75 flasks. The following day, on day 1, the media was changed. On day 3, the cells were passaged such that there were 9x10 cells seeded into 7 T175 flasks. On day 4, the media was changed in each flask. On day 6, RNP nucleofection was performed.

[0743] Nucleofection of HsMM Cells

[0744] HsMM cells were nucleofected with RNP using the Lonza 4D nucleofector. For each sample, 7 μL of RNP were combined with 0.3e6 cells in 15 μL P5 solution. RNP was prepared in a 6:1 gRNA:Cas9 ratio at various concentrations. For dual-cut samples that contain 2 gRNAs, RNP was pre-formed with a single gRNA first. RNP was formed by incubating gRNA and protein for 20 min at room temperature. After electroporation, 80 μL of complete growth media was added to each sample and samples were incubated in a 37° C., 5% CO2, humidified incubator. After 10 minutes, the samples were transferred to 12-well plates containing 2 mL of complete growth media that had been previously equilibrated in a 37° C., 5% CO2, humidified incubator.

[0745] Cell Harvesting and gDNA Extraction

[0746] To determine cell viability 48 hours after nucleofection, the cells were stained with Hoechst and Propidium Iodide (Life Technologies). Cell viability was then assessed using ImageXpress Micro (Molecular Devices). In general, samples with an overall cell viability above 70% were harvested and analyzed for indel analysis. To isolate genomic DNA from HsMMs, the cells were washed with saline buffer, trypsinized and centrifuged. The cell pellets were treated with lysis buffer from the Maxwell RSC Blood DNA Kit (Promega #AS1400), and genomic DNAs were extracted using a Maxwell® RSC48 instrument (Promega #AS8500) according to the manufacturer's instruction. The concentrations of genomic DNAs were determined using Qubit™ 1× dsDNA HS Assay Kit (Thermo Fisher Scientific Q33231) according to the manufacturer's instruction.

[0747] Amplicon Deep Sequencing Library Preparation for HsMM

[0748] To determine the gene editing efficiency, the genomic DNAs were amplified using primers flanking the DMD exon 45 genomic region. The following primer sequences were used: MiSeq_hE45_F TCGTCGGCAGCGTCAGATGTGTATAAGAGACAGgtctttctgtcttgtatcctttgg (SEQ ID NO: 724) and MiSeq_hE45_R GTCTCGTGGGCTCGGAGATGTGTATAAGAGACAGaatgttagtgcctttcaccc (SEQ ID NO: 725).

[0749] The size of the amplicons was verified by analyze a small amount of the PCR products on 2% E-gels (Thermo Fisher Scientific). The PCR product was purified by AMPure XP beads (A63881). The purified PCR product was amplified again with primers that contain barcodes and Illumina adaptors. Multiple barcoded samples were pooled, combined with PhiX library, and loaded onto the Illumina Mi-Seq platform. MiSeq Reagent Kit v3 (MS-102-3003) was used to produce a 600-cycle run.

[0750] Maintenance and Differentiation of C2C12 Myotubes

[0751] C2C12 are maintained in DMEM supplemented with 10% FBS (Fetal Bovine Serum) and 1% Pen/Strep. For culture purposes, cells should not be allowed to reach >75% confluency. C2C12 myoblasts are differentiated in DMEM supplemented with 2% HS and 1% Pen/Strep. Briefly, cells are seeded at 42-45 k/cm² and differentiation is started 24 hr after seeding (once cells reach ˜90-95% confluency). Differentiation medium is changed on day 1 and then refreshed every other day.

[0752] Transduction of C2C12 Myotubes

[0753] C2C12 myoblasts were allowed to differentiate to myotubes in differentiation medium (DMEM with 2% horse serum and 1% Pen/Strep) for 6 days. Two hours before viral transduction, myotubes were treated with Neuraminidase type III (Sigma-Aldrich, 50 mU/ml), followed by washing with differentiation medium twice. Myotubes were incubated with AAV (MOI 1.0E7) and centrifuged at 1000×g at 4 C for 1.5 hours. After spin transduction, the virus is aspirated, and the myotubes are washed with cold PBS once followed by two washes with differentiation medium. The myotubes are cultured in differentiation medium for an additional week (7 days) before being harvested for INDEL analysis (ICE/NGS) or fixed for immunohistochemistry analysis (IHC). DNA/RNA extraction was performed using the Qiagen AllPrep DNA/RNA Minikit

[0754] Cas9 Nuclear Localization by Immunofluorescence Staining of C2C12 Myotubes

[0755] 7 days post AAV transduction (day 12 of myotube differentiation) C2C12 myotubes were fixed with 4% paraformaldehyde (PFA) for 20 mins at room temperature (RT). After fixation, cells were washed twice with PBS followed by permeabilization with PBS-0.5% Triton for 15 mins at RT. Prior to incubation with primary antibodies cells were incubated with a blocking buffer for 30 mins at RT (PBS+10% FBS+0.1% Triton). Cell were then incubated with primary antibodies in block for 2 hours at RT (or overnight at 4° C.) followed by 3 washes with PBS-Tween 0.1%. Secondary antibodies are added for 1.5-2 hours at RT. Antibodies for these studies are listed here at Table 12:

TABLE 12

| | Host | Dilution |
|---|---|---|
| Primary Antibodies | | |
| SluCas9 (GenScript 11E3A9-1) | Mouse | 1:100 |
| SaCas9 (Diagenode C15200230-100) | Mouse | 1:400 |
| MyoG | Rabbit | 1:200 |
| Secondary Antibodies | | |
| Anti-mouse 488 | | 1:500 |
| Anti-Rabbit 594 | | 1:500 |

[0756] Vector Genome Quantitation

[0757] Quantitative polymerase chain reaction (qPCR) was used to quantify levels of AAV9 DNA in C2C12 differentiated cells. gDNA was extracted using the Qiagen AllPrep kit and quantified using the Qubit 4 Fluorometer and diluted to a final concentration of 2.5 ng/μL.

[0758] Absolute quantification of AAV9 vectors was performed by constructing a standard curve prepared from known quality of linearized plasmids encoding the region of interest. A set of Quality control (QC) were included to validate the methods of quantification. A set of non-template control (NTC) samples were included to confirm the specificity of reactions.

[0759] qPCR reactions were conducted in triplicate using a QuantStudio 6 Flex Real-Time PCR System (Thermo Fisher). A linear regression analysis was performed using threshold cycle (Ct) values of the standard curve. From this linear regression, the Ct values of the samples were used to quantify the number of copies per μg of gDNA of AAV9 present in each sample.

[0760] Cas9 and sgRNA Transgene Expression

[0761] Reverse transcription polymerase chain reaction (RT-qPCR) was used to quantify levels of Cas9 mRNA and the expression of gRNA in C2C12 differentiated cells. RNA was extracted using the Qiagen AllPrep kit and extracted RNA were quantified using the Qubit 4 Fluorometer and diluted to a final concentration of 20 ng/μL. Absolute quantification of gRNA and Cas9 mRNA were performed by constructing a standard curve prepared from known quality of a T7 transcript encoding the corresponding region of interest. A set of Quality control (QC) were included to validate the methods of quantification. A set of non-template control (NTC) samples were included to confirm the specificity of reactions.

[0762] RT-qPCR reactions were conducted in triplicate using a QuantStudio 6 Flex Real-Time PCR System (Thermo Fisher). A linear regression analysis was performed using threshold cycle (Ct) values of the standard curve. From this linear regression, the Ct values of the samples were used to quantify the number of copies per μg of RNA of either Cas9 mRNA or gRNA present in samples.

[0763] Amplicon Deep Sequencing Library Preparation for C2C12

[0764] gDNA was extracted using the Qiagen AllPrep kit. The relevant locus for exon 45 of mouse Dmd was amplified by PCR and amplified products were purified by AMPure beads (0.8×) followed by QC with 1% E-gel. DNA concentrations were measured using QuBiT for normalization of samples and Illumina sequencing libraries were created from these PCR products using a MiSeq Reagent Kit v3 (600-cycle).

[0765] Next Generation Sequencing Data Analysis

[0766] A custom bioinformatic workflow was used to process the Illumina sequencing data. First, poor quality reads were removed. Reads that passed the quality filter were trimmed using Trimmomatic to remove adapters and low quality bases. Then reads mapping to the PhiX genome were removed, and paired end reads were merged using PEAR. Based on the expected cut sites corresponding to the two guides, three reference amplicon sequences were created—wildtype amplicon, deletion amplicon with a deletion between the cutsites for the two guides, and inversion amplicon with an inversion of the sequence between the two the cutsites for the two guides. The merged reads were assigned to one of three amplicons (wild-type, deletion, inversion) based on the alignment score provided by the Needleman Wunsch algorithm as implemented in ParasailNeedle. The CIGAR string provided by the alignment algorithm was parsed to identify the sequence of indel events. The summarized table of indel events and their frequencies was overlaid with information on exon length, exon frame, and position of the premature stop codon introduced as a result of the DMD disease causing mutation, to characterize Cas9-associated indel events as productive (e.g., precise deletion, RF+1, RF Other, Exon skipping) or non-productive (e.g., OE) (Table 13). Throughout this workflow, a stringent set of QQC criteria was applied to filter poor quality samples. (Table 13).

TABLE 13

| | | |
|---|---|---|
| Indel | Ranking | |
| group | Order | Definition |

Wild-type amplicon

| | | |
|---|---|---|
| NE | 1 | insertion = 0 & deletion = 0 |
| RF + 1 | 2 | 1-nt insertion at a reframe guide |
| RF Other | 3 | 3n + 1 deletion within the exon boundary at the |
| | | only reframe guide \| no edits at the exon guide |
| | | aggregated 3n + 1 deletion within the exon |
| | | boundary at the two reframe guides |
| | | <17-nt insertion at the only reframe guide \| no |
| | | edits at the exon gate |
| | | <17-nt aggregated 3n +1 insertion at the two |
| | | reframe guides |
| Exon | 4 | indels overlap with the splice acceptor (AG) |
| skipping | | (5′-end of the target exon) |
| | | deletion with ≥ 9-nt overlap with the splicing |
| | | window at one of the two guides |
| | | insertion at the exact GT/AG splicing sites and |
| | | with length ≥ 9-nt at one of the two guides |
| OE | 5 | Other indels |

Deletion amplicon

| | | |
|---|---|---|
| Precise | 1 | segmental deletion between the two cut sites |
| deletion | | |
| (Rest) | 2 | SingleCut indel profiling with 3n phase |

Inversion amplicon

| | | |
|---|---|---|
| OE | 1 | all indels |

[0767] Animal and Study Design

[0768] This study was designed to evaluate all-in-one gene editing vector candidates that have been created to include both the sgRNA and a Cas9 endonuclease to mediate gene editing at the DMD locus. In this study, the efficacy of the one-vector gene editing candidates was assessed in vivo by measuring dystrophin restoration, on-target gene editing, tissue vector genomes, and Cas9 and sgRNA transgene expression following an intraperitoneal administration to dEx44 mice at postnatal day 4 or 5.

[0769] Table 14A describes the in-vivo study design:

| Group | Mouse | | | Test Article Vector | # of | Dose | Sample Collection and |
|---|---|---|---|---|---|---|---|
| # | Strain | Age | Test Article | Configuration | Animals | (vg/kg) | Analysis |
| 1 | WT | PND4 to | Vehicle | N/A | 6 | N/A | Tissue collection at 4 |
| 2 | ΔEx44 | PND5 | | | 6 | N/A | weeks post-dose |
| 3 | | | EX 145 | AAV9-Cas9:AAV9-M-sgRNA- | 8 | 1 × 10¹⁴: | Collect: heart, TA, |
| | | | | 145 | | 1 × 10¹⁴ | quadriceps, triceps, |
| 4 | | | AAV9-E45S124 | Slu24:2XNLS:7SK-Hlm | 8 | 2 × 10¹⁴ | diaphragm, and liver |
| 5 | | | AAV9-vVT046 | Slu18/4:2XNLS+:hU6-hU6 | 8 | 2 × 10¹⁴ | Analyses: Dystrophin |
| 6 | | | AAV9-vVT047 | Slu18/4:3XNLS:hU6-hU6 | 8 | 2 × 10¹⁴ | restoration, on-target gene |
| 7 | | | AAV9-vVT048 | Slu18/4:3XNLS:hU6-7SK | 8 | 2 × 10¹⁴ | editing, Cas9 protein |
| 8 | | | AAV9-vVT052 | Slu21/7:2XNLS+:7SK-H1m | 8 | 2 × 10¹⁴ | expression, vector |
| 9 | | | AAV9-vVT054 | Slu24:3XNLS:7SK-H1m | 8 | 2 × 10¹⁴ | genome copy number, and |
| 10 | | | AAV9-vVT049 | Slu18/4:3XNLS:H1m-M11 | 8 | 2 × 10¹⁴ | transgene expression on |
| 11 | | | AAV9-vVT050B | Slu18/4:3XNLS:7SK-H1m | 8 | 2 × 10¹⁴ | select tissues |
| 13 | | | AAV9-vVT051 | Slu18/4:2XNLS+:7SK-H1m | 8 | 2 × 10¹⁴ | |
| 14 | | | AAV9-vVT053B | SaKKH10/20:2XNLS+:7SK- | 8 | 2 × 10¹⁴ | |
| | | | | H1m | | | |

WT = wildtype
PND4 to PND5 = postnatal day 4 to postnatal day 5
N/A = no applicable

[0770] Amplicon Deep Sequencing Library Preparation for In Vivo Study

[0771] gDNA was extracted from mouse heart, quadricep, and triceps tissue using the Maxwell RSC Tissue DNA Kit and quantified via Qubit. The relevant locus of exon 45 of the mouse DMD gene was amplified using PCR. PCR products were visualized using both E-gel and TapeStation to confirm proper size and were purified using AMPure XP beads. PCR products then underwent a second PCR reaction to add unique 5′ and 3′ barcodes corresponding to each sample. These PCR products were quantified via Qubit and normalized to 4 nM each. The normalized products were then pooled, combined with a PhiX library to increase diversity, and loaded onto a MiSeq instrument. The library was sequenced using a MiSeq Reagent Kit v3 (600-cycle) and raw data was transferred to the DCS team.

[0772] Next Generation Sequencing Data Analysis for In Vivo Study

[0773] A custom bioinformatic workflow was used to process the Illumina sequencing data. First, poor quality reads (below Q30) were removed. The surviving reads were trimmed using Trimmomatic Trimmomatic to remove adapters and low quality bases. Then reads mapping to the PhiX genome were removed, and paired end reads were merged using PEAR. Based on the expected cut sites corresponding to the two guides, three reference amplicon sequences were created—wildtype amplicon, deletion amplicon with a deletion between the cut sites for the two guides, and inversion amplicon with an inversion of the sequence between the two the cut sites for the two guides. The merged reads were assigned to one of three amplicons (wild-type, deletion, inversion) based on the alignment score provided by the Needleman Wunsch algorithm as implemented in ParasailNeedle. The CIGAR string provided by the alignment algorithm was parsed to identify the sequence of indel events. The summarized table of indel events and their frequencies was overlaid with information on exon length, exon frame, and position of the premature stop codon introduced as a result of the DMD disease causing mutation, to characterize Cas9-associated indel events as productive (e.g., precise deletion, RF+1, RF Other, Exon skipping) or non-productive (e.g., OE) (Table 1). Throughout this workflow, a stringent set of QC criteria was applied to filter poor quality samples and all samples are checked for potential contaminations from other treatment groups in the same study.

[0774] 2. Results

[0775] Dual Cut sgRNA In Vitro Screening

[0776] The average indel frequency of sgRNAs targeting exon 45 was tested in primary human skeletal muscle myoblasts (HsMM) (FIG. 8), with a high-performing SpCas9 sgRNA (E45Sp52) included as a reference. Each of the five SluCas9 sgRNA pairs evaluated showed an average precise segmental deletion frequency higher than 60% (FIG. 8). The sequences of the spacers for the guide RNAs used in FIG. 8 (i.e., 18, 4, and 18+4; 21, 7, and 21+7; 17, 22, and 17+22; 17, 23 and 17+23; and 19, 21, and 19+21) are shown in Table 10.

[0777] The average indel frequency of sgRNAs targeting exon 51 was determined in HEK293FT cells (FIG. 9), which shows an indel frequency higher than 50% and an average precise segmental deletion frequency above 50% for E51SaKKH20/9, E51SaKKH20/27, E51SL10/3, E51SL31/5, E51SL31/7, E51SL31/8, E51SL10/16, E51SL23/31 and E51SL10/24 in HEK293FT cells. Table 14B shows the sgRNA ID and the spacer sequence for each sgRNA pairing shown in FIG. 9, where the pairings shown on the X-axis in FIG. 9 (e.g., 2+6) are within the sgRNA ID as the last character of each term (e.g., E51Sa2_E51Sa6).

TABLE 14B

| | Protospacer sequence |
|---|---|
| sgRNA ID | (a comma separates the two spacers) |
| E51Sa2_E51Sa6 | GTTGTGTCACCAGAGTAACAG (SEQ ID NO: 20), |
| | TTGATCAAGTTATAAAATCACA (SEQ ID NO: 24) |
| E51SaCas9KKH4_E51SaCas9KKH43 | ATGATCATCTCGTTGATATCCT (SEQ ID NOS: 1022, 2031), |
| | TAGCTCCTACTCAGACTGTTAC (SEQ ID NO: 1055) |
| E51SaCas9KKH20_E51SaCas9KKH5 | CCACAGGTTGTGTCACCAGAGT (SEQ ID NO: 1037), |
| | AAGGTCACCCACCATCACCCTC (SEQ ID NO: 1023) |
| E51SaCas9KKH43_E51SaCas9KKH6 | TAGCTCCTACTCAGACTGTTAC (SEQ ID NO: 1055), |
| | ATCACCCTCTGTGATTTTATAA (SEQ ID NO: 1024) |
| E51SaCas9KKH43_E51SaCas9KKH7 | TAGCTCCTACTCAGACTGTTAC (SEQ ID NO: 1055), |
| | ATAACTTGATCAAGCAGAGAAA (SEQ ID NO: 1025) |
| E51SaCas9KKH20_E51SaCas9KKH9 | CCACAGGTTGTGTCACCAGAGT (SEQ ID NO: 1037), |
| | ATCAAGCAGAGAAAGCCAGTCG (SEQ ID NO: 1027) |
| E51SaCas9KKH10_E51SaCas9KKH43 | CAGTCGGTAAGTTCTGTCCAAG (SEQ ID NO: 1028), |
| | TAGCTCCTACTCAGACTGTTAC (SEQ ID NO: 1055) |
| E51SaCas9KKH11_E51SaCas9KKH43 | GTAAGTTCTGTCCAAGCCCGGT (SEQ ID NO: 1029), |
| | TAGCTCCTACTCAGACTGTTAC (SEQ ID NO: 1055) |
| E51SaCas9KKH12_E51SaCas9KKH20 | AGCCCGGTTGAAATCTGCCAGA (SEQ ID NOS: 1030, 2041), |
| | CCACAGGTTGTGTCACCAGAGT (SEQ ID NO: 1037) |
| E51SaCas9KKH13_E51SaCas9KKH20 | AGCAGGTACCTCCAACATCAAG (SEQ ID NOS: 1031, 2043), |
| | CCACAGGTTGTGTCACCAGAGT (SEQ ID NO: 1037) |
| E51SaCas9KKH14_E51SaCas9KKH20 | CAACATCAAGGAAGATGGCATT (SEQ ID NO: 1032), |
| | CCACAGGTTGTGTCACCAGAGT (SEQ ID NO: 1037) |
| E51SaCas9KKH20_E51SaCas9KKH27 | CCACAGGTTGTGTCACCAGAGT (SEQ ID NO: 1037), |
| | TCAACGAGATGATCATCAAGCA (SEQ ID NOS: 1042, 2060) |
| E51SaCas9KKH20_E51SaCas9KKH28 | CCACAGGTTGTGTCACCAGAGT (SEQ ID NO: 1037), |
| | GTGACCTTGAGGATATCAACGA (SEQ ID NO: 1043) |
| E51SaCas9KKH20_E51SaCas9KKH29 | CCACAGGTTGTGTCACCAGAGT (SEQ ID NO: 1037), |
| | TGGGTGACCTTGAGGATATCAA (SEQ ID NOS: 1044, 2063) |
| E51SaCas9KKH20_E51SaCas9KKH32 | CCACAGGTTGTGTCACCAGAGT (SEQ ID NO: 1037), |
| | AAGTTATAAAATCACAGAGGGT (SEQ ID NO: 1045) |
| E51SaCas9KKH20_E51SaCas9KKH33 | CCACAGGTTGTGTCACCAGAGT (SEQ ID NO: 1037), |
| | ATCAAGTTATAAAATCACAGAG (SEQ ID NO: 1046) |
| E51SaCas9KKH20_E51SaCas9KKH34 | CCACAGGTTGTGTCACCAGAGT (SEQ ID NO: 1037), |
| | TTGATCAAGTTATAAAATCACA (SEQ ID NO: 24) |
| E51SaCas9KKH35_E51SaCas9KKH43 | CTTTCTCTGCTTGATCAAGTTA (SEQ ID NO: 1047), |
| | TAGCTCCTACTCAGACTGTTAC (SEQ ID NO: 1055) |
| E51SaCas9KKH20_E51SaCas9KKH36 | CCACAGGTTGTGTCACCAGAGT (SEQ ID NO: 1037), |
| | CCGACTGGCTTTCTCTGCTTGA (SEQ ID NO: 1048) |
| E51SaCas9KKH20_E51SaCas9KKH39 | CCACAGGTTGTGTCACCAGAGT (SEQ ID NO: 1037), |
| | AAATGCCATCTTCCTTGATGTT (SEQ ID NOS: 1051, 2070) |
| E51SaCas9KKH20_E51SaCas9KKH41 | CCACAGGTTGTGTCACCAGAGT (SEQ ID NO: 1037), |
| | AGGAAACTGCCATCTCCAAACT (SEQ ID NO: 1053) |
| E51SL1_E51SL10 | TGATCATCTCGTTGATATCCTC (SEQ ID NO: 170), |
| | GTCACCAGAGTAACAGTCTGAG (SEQ ID NO: 179) |
| E51SL2_E51SL31 | TTGATCAAGCAGAGAAAGCCAG (SEQ ID NO: 171), |
| | AGCTCCTACTCAGACTGTTACT (SEQ ID NO: 200) |
| E51SL10_E51SL3 | GTCACCAGAGTAACAGTCTGAG (SEQ ID NO: 179), |
| | AGTCGGTAAGTTCTGTCCAAGC (SEQ ID NO: 172) |
| E51SL31_E51SL5 | AGCTCCTACTCAGACTGTTACT (SEQ ID NO: 200), |
| | CAGAGCAGGTACCTCCAACATC (SEQ ID NO: 174) |
| E51SL31_E51SL7 | AGCTCCTACTCAGACTGTTACT (SEQ ID NO: 200), |
| | CAAGGAAGATGGCATTTCTAGT (SEQ ID NO: 176) |
| E51SL31_E51SL8 | AGCTCCTACTCAGACTGTTACT (SEQ ID NO: 200), |
| | AGATGGCATTTCTAGTTTGGAG (SEQ ID NO: 177) |
| E51SL10_E51SL15 | GTCACCAGAGTAACAGTCTGAG (SEQ ID NO: 179), |
| | CAACGAGATGATCATCAAGCAG (SEQ ID NO: 184) |
| E51SL10_E51SL16 | GTCACCAGAGTAACAGTCTGAG (SEQ ID NO: 179), |
| | GAGGGTGATGGTGGGTGACCTT (SEQ ID NOS: 22, 185) |
| E51SL10_E51SL18 | GTCACCAGAGTAACAGTCTGAG (SEQ ID NO: 179), |
| | TATAAAATCACAGAGGGTGATG (SEQ ID NOS: 23, 187) |
| E51SL10_E51SL19 | GTCACCAGAGTAACAGTCTGAG (SEQ ID NO: 179), |
| | AGTTATAAAATCACAGAGGGTG (SEQ ID NO: 188) |
| E51SL10_E51SL20 | GTCACCAGAGTAACAGTCTGAG (SEQ ID NO: 179), |
| | TGATCAAGTTATAAAATCACAG (SEQ ID NO: 189) |
| E51SL21_E51SL31 | TTGATCAAGTTATAAAATCACA (SEQ ID NO: 24), |
| | AGCTCCTACTCAGACTGTTACT (SEQ ID NO: 200) |
| E51SL22_E51SL31 | GGGCTTGGACAGAACTTACCGA (SEQ ID NO: 191), |
| | AGCTCCTACTCAGACTGTTACT (SEQ ID NO: 200) |
| E51SL23_E51SL31 | CTCTGGCAGATTTCAACCGGGC (SEQ ID NO: 192), |
| | AGCTCCTACTCAGACTGTTACT (SEQ ID NO: 200) |
| E51SL10_E51SL24 | GTCACCAGAGTAACAGTCTGAG (SEQ ID NO: 179), |
| | ACCTGCTCTGGCAGATTTCAAC (SEQ ID NO: 193) |
| E51SL25_E51SL31 | TACCTGCTCTGGCAGATTTCAA (SEQ ID NO: 194), |
| | AGCTCCTACTCAGACTGTTACT (SEQ ID NO: 200) |
| E51SL10_E51SL26 | GTCACCAGAGTAACAGTCTGAG (SEQ ID NO: 179), |
| | CTTGATGTTGGAGGTACCTGCT (SEQ ID NO: 195) |
| E51SL10_E51SL27 | GTCACCAGAGTAACAGTCTGAG (SEQ ID NO: 179), |
| | AATGCCATCTTCCTTGATGTTG (SEQ ID NO: 196) |
| E51SL10_E51SL28 | GTCACCAGAGTAACAGTCTGAG (SEQ ID NO: 179), |
| | AGAAATGCCATCTTCCTTGATG (SEQ ID NO: 197) |
| E51SLCas9KH26_E51SLCas9KH73 | GATGGCAGTTTCCTTAGTAACC (SEQ ID NOS: 1036, 2048), |
| | AGCTCCTACTCAGACTGTTACT (SEQ ID NO: 200) |
| E51SLCas9KH25_E51SLCas9KH73 | TAGTTTGGAGATGGCAGTTTCC (SEQ ID NO: 2047), |
| | AGCTCCTACTCAGACTGTTACT (SEQ ID NO: 200) |
| E51SLCas9KH24_E51SLCas9KH73 | TGGCATTTCTAGTTTGGAGATG (SEQ ID NO: 2046), |
| | AGCTCCTACTCAGACTGTTACT (SEQ ID NO: 200) |
| E51SLCas9KH21_E51SLCas9KH73 | CAAGGAAGATGGCATTTCTAGT (SEQ ID NO: 176), |
| | AGCTCCTACTCAGACTGTTACT (SEQ ID NO: 200) |
| E51SLCas9KH20_E51SLCas9KH30 | AACATCAAGGAAGATGGCATTT (SEQ ID NO: 2044), |
| | CACAGGTTGTGTCACCAGAGTA (SEQ ID NO: 2051) |
| E51SLCas9KH19_E51SLCas9KH30 | GGTACCTCCAACATCAAGGAAG (SEQ ID NO: 175), |
| | CACAGGTTGTGTCACCAGAGTA (SEQ ID NO: 2051) |
| E51SLCas9KH20_E51SLCas9KH32 | AACATCAAGGAAGATGGCATTT (SEQ ID NO: 2044), |
| | TGTCACCAGAGTAACAGTCTGA (SEQ ID NO: 2053) |
| E51SLCas9KH20_E51SLCas9KH34 | AACATCAAGGAAGATGGCATTT (SEQ ID NO: 2044), |
| | CACCAGAGTAACAGTCTGAGTA (SEQ ID NO: 2054) |
| E51SLCas9KH18_E51SLCas9KH73 | AGCAGGTACCTCCAACATCAAG (SEQ ID NOS: 1031, 2043), |
| | AGCTCCTACTCAGACTGTTACT (SEQ ID NO: 200) |
| E51SLCas9KH17_E51SLCas9KH73 | CAGAGCAGGTACCTCCAACATC (SEQ ID NO: 174), |
| | AGCTCCTACTCAGACTGTTACT (SEQ ID NO: 200) |
| E51Sa2 | GTTGTGTCACCAGAGTAACAGT (SEQ ID NO: 20) |
| E51SL10 | GTCACCAGAGTAACAGTCTGAG (SEQ ID NO: 179) |
| E51SluCas9-2 | TTGATCAAGCAGAGAAAGCCAG (SEQ ID NO: 171) |
| E51SluCas9-10 | GTCACCAGAGTAACAGTCTGAG (SEQ ID NO: 179) |

[0778] AAV Configurations for the Dual Cut Single Vector Candidates

[0779] A combination of promoter orientations, and configurations, NLS sequences and sgRNA scaffolds were selected for generating AAV plasmids and evaluation on sgRNA transgene expression, AAV manufacturability, and editing efficiency in vitro and in vivo. AAV plasmid configurations are listed in Table 15 and Table 16. Promoter, NLS and scaffold sequences are listed in Table 17.

[0780] Guide RNA were prepared according to standard methods in a single guide (sgRNA) format. A single AAV vector was prepared that expresses the guide RNA pair and a variant SaCas9 or the guide RNA pair and a variant SluCas9. The AAV vectors were administered to C2C12 cells in vitro and to mice (e.g., dEx44 mice) in vivo to assess the ability of the AAV to express the guide RNA and Cas9, edit the targeted exon, and reframe the dystrophin gene (in vivo studies only).

TABLE 15

| Pol III | | | | | | | |
|---|---|---|---|---|---|---|---|
| Promoter | Orientation | Configuration | NLS1 | Endonuclease | NLS2 | NLS3 | Scaffold |
| hU6c:hU6c | ← [symbol] → | hU6c-Cas9- | c-Myc- | SluCas9 | SV-40-GSGS | Nucleoplasmin- | V5 |
| | | hU6c | GSVD | | | GSGS | |
| | ← [symbol] → | hU6c-Cas9- | c-Myc- | SaCas9-KKH | SV-40-GSGS | Nucleoplasmin- | V2 |
| | | hU6c | GSVD | | | GSGS | |
| | ← [symbol] → | hU6c-Cas9- | c-Myc- | SluCas9 | SV-40-MCS- | Nucleoplasmin- | V5 |
| | | hU6c | GSVD | | GSGS | GSGS | |
| | ← [symbol] → | hU6c-Cas9- | c-Myc- | SaCas9-KKH | SV-40-MCS- | Nucleoplasmin- | V2 |
| | | hU6c | GSVD | | GSGS | GSGS | |
| | ← [symbol] → | hU6c-Cas9- | SV-40 | SluCas9 | Nucleoplasmin | N/A | V5 |
| | | hU6c | (+) | | | | |
| | ← [symbol] → | hU6c-Cas9- | SV-40 | SaCas9-KKH | Nucleoplasmin | N/A | V2 |
| | | hU6c | (+) | | | | |
| | ← ← [symbol] | hU6c-hU6c- | c-Myc- | SluCas9 | SV-40-GSGS | Nucleoplasmin- | V5 |
| | | Cas9 | GSVD | | | GSGS | |
| | ← ← [symbol] | hU6c-hU6c- | c-Myc- | SaCas9-KKH | SV-40-GSGS | Nucleoplasmin- | V2 |
| | | Cas9 | GSVD | | | GSGS | |
| | ← ← [symbol] | hU6c-hU6c- | c-Myc- | SluCas9 | SV-40-MCS- | Nucleoplasmin- | V5 |
| | | Cas9 | GSVD | | GSGS | GSGS | |
| | ← ← [symbol] | hU6c-hU6c- | c-Myc- | SaCas9-KKH | SV-40-MCS- | Nucleoplasmin- | V2 |
| | | Cas9 | GSVD | | GSGS | GSGS | |
| | ← ← [symbol] | hU6c-hU6c- | SV-40 | SluCas9 | Nucleoplasmin | N/A | V5 |
| | | Cas9 | (+) | | | | |
| | ← ← [symbol] | hU6c-hU6c- | SV-40 | SaCas9-KKH | Nucleoplasmin | N/A | V2 |
| | | Cas9 | (+) | | | | |
| | → → [symbol] | hU6c-hU6c- | c-Myc- | SluCas9 | SV-40-GSGS | Nucleoplasmin- | V5 |
| | | Cas9 | GSVD | | | GSGS | |
| | → → [symbol] | hU6c-hU6c- | c-Myc- | SaCas9-KKH | SV-40-GSGS | Nucleoplasmin- | V2 |
| | | Cas9 | GSVD | | | GSGS | |
| | → → [symbol] | hU6c-hU6c- | c-Myc- | SluCas9 | SV-40-MCS- | Nucleoplasmin- | V5 |
| | | Cas9 | GSVD | | GSGS | GSGS | |
| | → → [symbol] | hU6c-hU6c- | c-Myc- | SaCas9-KKH | SV-40-MCS- | Nucleoplasmin- | V2 |
| | | Cas9 | GSVD | | GSGS | GSGS | |
| | → → [symbol] | hU6c-hU6c- | SV-40 | SluCas9 | Nucleoplasmin | N/A | V5 |
| | | Cas9 | (+) | | | | |
| | → → [symbol] | hU6c-hU6c- | SV-40 | SaCas9-KKH | Nucleoplasmin | N/A | V2 |
| | | Cas9 | (+) | | | | |
| hU6c:7SK2 | ← [symbol] → | hU6c-Cas9- | c-Myc- | SluCas9 | SV-40-GSGS | Nucleoplasmin- | V5 |
| | | 7SK2 | GSVD | | | GSGS | |
| | ← [symbol] → | hU6c-Cas9- | c-Myc- | SaCas9-KKH | SV-40-GSGS | Nucleoplasmin- | V2 |
| | | 7SK2 | GSVD | | | GSGS | |
| | ← [symbol] → | hU6c-Cas9- | c-Myc- | SluCas9 | SV-40-MCS- | Nucleoplasmin- | V5 |
| | | 7SK2 | GSVD | | GSGS | GSGS | |
| | ← [symbol] → | hU6c-Cas9- | c-Myc- | SaCas9-KKH | SV-40-MCS- | Nucleoplasmin- | V2 |
| | | 7SK2 | GSVD | | GSGS | GSGS | |
| | ← ← [symbol] | hU6c-7SK2- | c-Myc- | SluCas9 | SV-40-MCS- | Nucleoplasmin- | V5 |
| | | Cas9 | GSVD | | GSGS | GSGS | |
| | ← ← [symbol] | hU6c-7SK2- | c-Myc- | SaCas9-KKH | SV-40-MCS- | Nucleoplasmin- | V2 |
| | | Cas9 | GSVD | | GSGS | GSGS | |
| | ← ← [symbol] | hU6c-7SK2- | c-Myc- | SluCas9 | SV-40-GSGS | Nucleoplasmin- | V5 |
| | | Cas9 | GSVD | | | GSGS | |
| | ← ← [symbol] | hU6c-7SK2- | c-Myc- | SaCas9-KKH | SV-40-GSGS | Nucleoplasmin- | V2 |
| | | Cas9 | GSVD | | | GSGS | |
| | ← ← [symbol] | hU6c-7SK2- | SV-40 | SluCas9 | Nucleoplasmin | N/A | V5 |
| | | Cas9 | (+) | | | | |
| | ← ← [symbol] | hU6c-7SK2- | SV-40 | SaCas9-KKH | Nucleoplasmin | N/A | V2 |
| | | Cas9 | (+) | | | | |
| | → → [symbol] | hU6c-7SK2- | c-Myc- | SluCas9 | SV-40-MCS- | Nucleoplasmin- | V5 |
| | | Cas9 | GSVD | | GSGS | GSGS | |
| | → → [symbol] | hU6c-7SK2- | c-Myc- | SaCas9-KKH | SV-40-MCS- | Nucleoplasmin- | V2 |
| | | Cas9 | GSVD | | GSGS | GSGS | |
| | → → [symbol] | hU6c-7SK2- | c-Myc- | SluCas9 | SV-40-GSGS | Nucleoplasmin- | V5 |
| | | Cas9 | GSVD | | | GSGS | |
| | → → [symbol] | hU6c-7SK2- | c-Myc- | SaCas9-KKH | SV-40-GSGS | Nucleoplasmin- | V2 |
| | | Cas9 | GSVD | | | GSGS | |
| | → → [symbol] | hU6c-7SK2- | SV-40 | SluCas9 | Nucleoplasmin | N/A | V5 |
| | | Cas9 | (+) | | | | |
| | → → [symbol] | hU6c-7SK2- | SV-40 | SaCas9-KKH | Nucleoplasmin | N/A | V2 |
| | | Cas9 | (+) | | | | |
| 7SK2:hU6c | ← [symbol] → | 7SK2-Cas9- | c-Myc- | SluCas9 | SV-40-GSGS | Nucleoplasmin- | V5 |
| | | hU6c | GSVD | | | GSGS | |
| | ← [symbol] → | 7SK2-Cas9- | c-Myc- | SaCas9-KKH | SV-40-GSGS | Nucleoplasmin- | V2 |
| | | hU6c | GSVD | | | GSGS | |
| | ← [symbol] → | 7SK2-Cas9- | c-Myc- | SluCas9 | SV-40-MCS- | Nucleoplasmin- | V5 |
| | | hU6c | GSVD | | GSGS | GSGS | |
| | ← [symbol] → | 7SK2-Cas9- | c-Myc- | SaCas9-KKH | SV-40-MCS- | Nucleoplasmin- | V2 |
| | | hU6c | GSVD | | GSGS | GSGS | |
| | ← ← [symbol] | 7SK2-hU6c- | c-Myc- | SluCas9 | SV-40-MCS- | Nucleoplasmin- | V5 |
| | | Cas9 | GSVD | | GSGS | GSGS | |
| | ← ← [symbol] | 7SK2-hU6c- | c-Myc- | SaCas9-KKH | SV-40-MCS- | Nucleoplasmin- | V2 |
| | | Cas9 | GSVD | | GSGS | GSGS | |
| | ← ← [symbol] | 7SK2-hU6c- | c-Myc- | SluCas9 | SV-40-GSGS | Nucleoplasmin- | V5 |
| | | Cas9 | GSVD | | | GSGS | |
| | ← ← [symbol] | 7SK2-hU6c- | c-Myc- | SaCas9-KKH | SV-40-GSGS | Nucleoplasmin- | V2 |
| | | Cas9 | GSVD | | | GSGS | |
| | ← ← [symbol] | 7SK2-hU6c- | SV-40 | SluCas9 | Nucleoplasmin | N/A | V5 |
| | | Cas9 | (+) | | | | |
| | ← ← [symbol] | 7SK2-hU6c- | SV-40 | SaCas9-KKH | Nucleoplasmin | N/A | V2 |
| | | Cas9 | (+) | | | | |
| | → → [symbol] | 7SK2-hU6c- | c-Myc- | SluCas9 | SV-40-MCS- | Nucleoplasmin- | V5 |
| | | Cas9 | GSVD | | GSGS | GSGS | |
| | → → [symbol] | 7SK2-hU6c- | c-Myc- | SaCas9-KKH | SV-40-MCS- | Nucleoplasmin- | V2 |
| | | Cas9 | GSVD | | GSGS | GSGS | |
| | → → [symbol] | 7SK2-hU6c- | c-Myc- | SluCas9 | SV-40-GSGS | Nucleoplasmin- | V5 |
| | | Cas9 | GSVD | | | GSGS | |
| | → → [symbol] | 7SK2-hU6c- | c-Myc- | SaCas9-KKH | SV-40-GSGS | Nucleoplasmin- | V2 |
| | | Cas9 | GSVD | | | GSGS | |
| | → → [symbol] | 7SK2-hU6c- | SV-40 | SluCas9 | Nucleoplasmin | N/A | V5 |
| | | Cas9 | (+) | | | | |
| | → → [symbol] | 7SK2-hU6c- | SV-40 | SaCas9-KKH | Nucleoplasmin | N/A | V2 |
| | | Cas9 | (+) | | | | |
| hU6c:H1m | ← [symbol] → | hU6c-Cas9- | c-Myc- | SluCas9 | SV-40-GSGS | Nucleoplasmin- | V5 |
| | | H1m | GSVD | | | GSGS | |
| | ← [symbol] → | hU6c-Cas9- | c-Myc- | SaCas9-KKH | SV-40-GSGS | Nucleoplasmin- | V2 |
| | | H1m | GSVD | | | GSGS | |
| 7SK2:H1m | ← [symbol] → | 7SK2-Cas9- | SV-40- | SluCas9 | Nucleoplasmin | N/A | V5 |
| | | H1m | GS | | | | |
| | ← [symbol] → | 7SK2-Cas9- | SV-40- | SaCas9-KKH | Nucleoplasmin | N/A | V2 |
| | | H1m | GS | | | | |
| | ← [symbol] → | 7SK2-Cas9- | SV-40 | SluCas9 | Nucleoplasmin | N/A | V5 |
| | | H1m | (+) | | | | |
| | ← [symbol] → | 7SK2-Cas9- | SV-40 | SaCas9-KKH | Nucleoplasmin | N/A | V2 |
| | | H1m | (+) | | | | |
| | ← [symbol] → | 7SK2-Cas9- | c-Myc- | SluCas9 | SV-40-MCS- | Nucleoplasmin- | V5 |
| | | H1m | GSVD | | GSGS | GSGS | |
| | ← [symbol] → | 7SK2-Cas9- | c-Myc- | SaCas9-KKH | SV-40-MCS- | Nucleoplasmin- | V2 |
| | | H1m | GSVD | | GSGS | GSGS | |
| | ← [symbol] → | 7SK2-Cas9- | c-Myc- | SaCas9 | SV-40-MCS- | Nucleoplasmin- | V2 |
| | | H1m | GSVD | | GSGS | GSGS | |
| H1m:M11 | ← [symbol] → | H1m-Cas9- | c-Myc- | SluCas9 | SV-40-MCS- | Nucleoplasmin- | V5 |
| | | M11 | GSVD | | GSGS | GSGS | |
| | ← [symbol] → | H1m-Cas9- | c-Myc- | SaCas9-KKH | SV-40-MCS- | Nucleoplasmin- | V2 |
| | | M11 | GSVD | | GSGS | GSGS | |

TABLE 16

| | Pol III Promoter | Orientation | Configuration |
|---|---|---|---|
| Self-complementary AAV | hU6:H1:7SK | → → → | hU6-H1-7SK1 |
| | hU6:7SK | → □ → | hU6-Stuffer-7SK1 |
| | hU6:7SK | → → □ | hU6-7SK-Stuffer |
| | hU6c:hU6c | ← □ → | hU6c-Stuffer-hU6c |
| | hU6c:mU6 | ← □ → | hU6c-Stuffer-mU6 |
| | 7SK2:hU6c:hU6c:7SK2 | ← □ → | 7SK2-hU6c-Stuffer-hU6c-7SK2 |
| | 7SK2:hU6c:mU6:7SK2 | ← □ → | 7SK2-hU6c-Stuffer-mU6c-7SK2 |
| | 7SK2:hU6c:hU6c:7SK2 | ← □ → | 7SK2-hU6c-Stuffer-hU6c-7SK2 |
| | 7SK2:hU6c:mU6:7SK2 | ← □ → | 7SK2-hU6c-Stuffer-mU6-7SK2 |
| Single-stranded AAV | hU6c:hU6c | ← □ → | hU6c-Stuffer-hU6c |
| | hU6c:mU6 | ← □ → | hU6c-Stuffer-mU6 |
| | 7SK2:hU6c:hU6c:7SK2 | ← □ → | 7SK2-hU6c-Stuffer-hU6c-7SK2 |
| | 7SK2:hU6c:mU6:75K2 | ← □ → | 7SK2-hU6c-Stuffer-mU6c-7SK2 |
| | 7SK2:hU6c:hU6c:75K2 | ← □ → | 7SK2-hU6c-Stuffer-hU6c-7SK2 |
| | 7SK2:hU6c:mU6:75K2 | ← □ → | 7SK2-hU6c-Stuffer-mU6-7SK2 |

TABLE 17

| Promoter | Sequences |
|---|---|
| hU6c | GAGGGCCTATTTCCCATGATTCCTTCATATTT |
| | GCATATACGATACAAGGCTGTTAGAGAGATAA |
| | TTGGAATTAATTTGACTGTAAACACAAAGATA |
| | TTAGTACAAAATACGTGACGTAGAAAGTAATA |
| | ATTTCTTGGGTAGTTTGCAGTTTTAAAATTAT |
| | GTTTTAAAATGGACTATCATATGCTTACCGTA |
| | ACTTGAAAGTATTTCGATTTCTTGGCTTTATA |
| | TATCTTGTGGAAAGGACGAAACACC |
| | (SEQ ID NO: 705) |
| 7SK2 | CTGCAGTATTTAGCATGCCCCACCCATCTGCA |
| | AGGCATTCTGGATAGTGTCAAAACAGCCGGAA |
| | ATCAAGTCCGTTTATCTCAAACTTTAGCATTT |
| | TGGGAATAAATGATATTTGCTATGCTGGTTAA |
| | ATTAGATTTTAGTTAAATTTCCTGCTGAAGCT |
| | CTAGTACGATAAGCAACTTGACCTAAGTGTAA |
| | AGTTGAGACTTCCTTCAGGTTTATATAGCTTG |
| | TGCGCCGCTTGGGTACCTC |
| | (SEQ ID NO: 706) |
| H1m | AATATTTGCATGTCGCTATGTGTTCTGGGAAA |
| | TCACCATAAACGTGAAATGTCTTTGGATTTGG |
| | GAATCTTATAAGTTCTGTATGAGACCACTCTT |
| | TCCC |
| | (SEQ ID NO: 707) |
| M11 | ATATTTAGCATGTCGCTATGTGTTCTGGGAAA |
| | CTTGACCTAAGTGTAAAGTTGAGATTTCCTTC |
| | AGGTTTATATAGTTCTGTATGAGACCACTCTT |
| | TCCC |
| | (SEQ ID NO: 708) |
| hU6 | ccCGAGTCCAACACCCGTGGGAATCCCATGGG |
| | CACCATGGCCCCTCGCTCCAAAAATGCTTTCG |
| | CGTCGCGCAGACACTGCTCGGTAGTTTCGGGG |
| | ATCAGCGTTTGAGTAAGAGCCCGCGTCTGAAC |
| | CCTCCGCGCCGCCCCGGCCCCAGTGGAAAGAC |
| | GCGCAGGCAAAACGCACCACGTGACGGAGCGT |
| | GACCGCGCGCCGAGCGCGCGCCAAGGTCGGGC |
| | AGGAAGAGGGCCTATTTCCCATGATTCCTTCA |
| | TATTTGCATATACGATACAAGGCTGTTAGAGA |
| | GATAATTAGAATTAATTTGACTGTAAACACAA |
| | AGATATTAGTACAAAATACGTGACGTAGAAAG |
| | TAATAATTTCTTGGGTAGTTTGCAGTTTTAAA |
| | ATTATGTTTTAAAATGGACTATCATATGCTTA |
| | CCGTAACTTGAAAGTATTTCGATTTCTTGGCT |
| | TTATATATCTTGTGGAAAGGACGAAACACC |
| | (SEQ ID NO: 42) |
| mU6 | Gatccgacgccgccatctctaggcccgcgccg |
| | gccccctcgcacagacttgtgggagaagctcg |
| | gctactcccctgccccggttaatttgcatata |
| | atatttcctagtaactatagaggcttaatgtg |
| | cgataaaagacagataatctgttctttttaat |
| | actagctacattttacatgataggcttggatt |
| | tctataagagatacaaatactaaattattatt |
| | ttaaaaaacagcacaaaaggaaactcacccta |
| | actgtaaagtaattgtgtgttttgagactata |
| | aatatcccttggagaaaagccttgtt |
| | (SEQ ID NO: 43) |
| H1 | CATATTTGCATGTCGCTATGTGTTCTGGGAAA |
| | TCACCATAAACGTGAAATGTCTTTGGATTTGG |
| | GAATCTTATAAGTTCTGTATGAGACCACGGTA |
| | CACC |
| | (SEQ ID NO: 44) |
| 7SK1 | CTGCAGTATTTAGCATGCCCCACCCATCTGCA |
| | AGGCATTCTGGATAGTGTCAAAACAGCCGGAA |
| | ATCAAGTCCGTTTATCTCAAACTTTAGCATTT |
| | TGGGAATAAATGATATTTGCTATGCTGGTTAA |
| | ATTAGATTTTAGTTAAATTTCCTGCTGAAGCT |
| | CTAGTACGATAAGTAACTTGACCTAAGTGTAA |
| | AGTTGAGATTTCCTTCAGGTTTATATAGCTTG |
| | TGCGCCGCCTGGGTAC |
| | (SEQ ID NO: 45) |
| NLS-linker | AA Sequences |
| c-Myc-GSVD | PLAKKKKLDGSVD (SEQ ID NO: 36) |
| SV-40-GS | PKKKRKVGS (SEQ ID NO: 37) |
| SV-40 (+) | PKKKRKVGIHGVPAA (SEQ ID NO: 38) |
| SV-40-GSGS | GSGSPKKKRKV (SEQ ID NO: 39) |
| SV-40- | TGGGPGGGAAAGSGSPKKKRKV |
| MCS-GSGS | (SEQ ID NO: 40) |
| Nucleoplasmin- | GSGSKRPAATKKAGQAKKKK |
| GSGS | (SEQ ID NO: 41) |
| Scaffold | Sequences |
| SluCas9 | GUUUCAGUACUCUGGAAACAGAAUCUACUGAA |
| scaffold V5 | ACAAGACAAUAUGUCGUGUUUAUCCCAUCA |
| | AUUUAUUGGUGGGAU |
| | (SEQ ID NO: 922) |
| SaCas9 | GTTTAAGTACTCTGTGCTGGAAACAGCACAGA |
| scaffold V2 | ATCTACTTAAACAAGGCAAAATGCCGTGTTTA |
| | TCTCGTCAACTTGTTGGCGAGA |
| | (SEQ ID NO: 500) |

[0781] In particular, the ability of in vitro single AAV-mediated delivery of gene-editing components to introduce productive editing and precise segmental deletion in the C2C12 mouse myotubes was tested (Table 18B, FIG. 10). In FIGS. 10-12, and 14-17, vector IDs vVT 046, 047, 048, 054, and 052 are shown in Table 18B with their associated sgRNA pairs. vVT009 has a 7SK2-SluCas9-H1m configuration, with a SluV2 scaffold, and a SV40 NLS on the N-terminus and nucleoplasmin NLS on the C-terminus. vVT053B has the same configuration and sequences as vVT053. The B stands for an A deletion on the backbone of pVT053B (outside of ITRs) that was introduced during cloning. The spacer sequences used in these sgRNA pairs are as follows (Table 18A):

TABLE 18A

| | Protospacer sequence |
|---|---|
| sgRNA ID | (a comma separates the two protospacer sequences) |
| E45SL18_E45SL4 | TTGTCAGAACAcTGAATGCAAC (SEQ ID NO: 553), |
| | cTTGaCGCTGCCCAATGCCATC (SEQ ID NO: 300) |
| E45SL21_E45SL7 | TACAGGAACTCCAGGATGGCAT (SEQ ID NO: 148/306), |
| | CTGgCAGAaAGgAgAAAGAGGT (SEQ ID NO: 301) |
| E45SaCas9KKH10_E45SaCas9KKH20 | TTGaCGCTGCCCAATGCCATCC (SEQ ID NO: 317), |
| | ACAGATGICAaTATTCTACAaG (SEQ ID NO: 554) |

[0782] Selected AAV configurations were evaluated for vector genome quantitation (FIG. 11) and transgene expression (FIG. 12), and immunofluorescence in C2C12 mouse myotubes (FIG. 13). Three AAV vectors, vVT046, vVT047, and vVT048, showed an average precise segmental deletion frequency higher than 15% in C2C12 mouse myotubes (FIG. 10). Equivalent vector genome copy number (FIG. 11) and Cas9 transgene expression (FIG. 12A) were observed between all AAV vectors in C2C12 mouse myotubes. Higher sgRNA expression was observed with hU6-H1m-7SK, hU6c-hU6c and hU6c-751(2. PolIII promoter combinations (FIG. 12B). Slightly lower sgRNA expression was observed with 7SK2-H1m promoter combination (FIG. 12B). sgRNA located upstream of Cas9 demonstrated overall higher expression in 7SK2-H1m promoter combination (FIG. 12B). Cas9 with 2×NLS+ and 3×NLS results in superior Cas9 localization to myonuclei (FIG. 13).

TABLE 18B

| Orientation | Configuration | NLS1 | Endonuclease | NLS2 | NLS3 | sgRNA pair | Scaffold | Vector ID |
|---|---|---|---|---|---|---|---|---|
| ← [symbol] → | hU6c-Cas9- | SV-40 | SluCas9 | Nucleoplasmin | N/A | E45Slu18/4 | V5 | vVT046 |
| | hU6c | (+) | | | | | | |
| ← [symbol] → | hU6c-Cas9- | c-Myc- | SluCas9 | SV-40-GSGS | Nucleoplasmin- | E45Slu18/4 | V5 | vVT047 |
| | hU6c | GSVD | | | GSGS | | | |
| ← [symbol] → | hU6c-Cas9- | c-Myc- | SluCas9 | SV-40-GSGS | Nucleoplasmin- | E45Slu18/4 | V5 | vVT048 |
| | 7SK2 | GSVD | | | GSGS | | | |
| ← [symbol] → | H1m-Cas9- | c-Myc- | SluCas9 | SV-40-GSGS | Nucleoplasmin- | E45Slu18/4 | V5 | vVT049 |
| | M11 | GSVD | | | GSGS | | | |
| ← [symbol] → | 7SK2-Cas9- | c-MYc- | SluCas9 | SV-40-GSGS | Nucleoplasmin- | E45Slu18/4 | V5 | vVT050 |
| | H1m | GSVD | | | GSGS | | | |
| ← [symbol] → | 7SK2-Cas9- | SV-40 | SluCas9 | Nucleoplasmin | N/A | E45Slu18/4 | V5 | vVT051 |
| | H1m | (+) | | | | | | |
| ← [symbol] → | 7SK2-Cas9- | SV-40 | SluCas9 | Nucleoplasmin | N/A | E45Slu21/7 | V5 | vVT052 |
| | H1m | (+) | | | | | | |
| ← [symbol] → | 7SK2-Cas9- | SV-40 | SaCas9-KKH | Nucleoplasmin | N/A | E45SaKKH | V2 | vVT053 |
| | H1m | (+) | | | | 10/20 | | |
| ← [symbol] → | 7SK2-Cas9- | c-Myc- | SluCas9 | SV-40-GSGS | Nucleoplasmin- | E45Slu24 | V5 | vVT054 |
| | H1m | GSVD | | | GSGS | | | |

[0783] The ability of in vivo single AAV-mediated delivery of gene-editing components to successfully reframe exon 45 in the cardiac and skeletal muscle of dEx44 mice was tested. All selected AAV configurations showed an average total indel frequency higher than 12.5% and E45Slu18/4 sgRNA pair showed an average precise segmental deletion frequency higher than 15% in the heart (FIG. 14A). vVT047 with E45Slu18/4 sgRNA pair showed an average precise segmental deletion frequency higher than 5% in quadriceps (FIG. 14B). All selected AAV configurations showed an average total dystrophin protein restoration higher than 30% of WT in hearts of dEx44 DMD mice (FIG. 15A). vVT054, vVT046, vVT047 and vVT048 showed an average total dystrophin protein restoration higher than 10% of WT in quadriceps of dEx44 DMD mice (FIG. 15B). AAV vectors with 2×NLS+ and 3×NLS enhances editing efficiency and dystrophin restoration in skeletal muscles (FIG. 15B). Equivalent AAV vector genome was observed in all groups in heart and skeletal muscles. Higher overall AAV vector copy was observed in heart than compared to skeletal muscle (FIGS. 16A and 16B). The upstream sgRNA was more efficiently expressed than the downstream cassette in vVT046, vVT047, vVT048 AAV vectors (FIGS. 17A and 17B). Both upstream and downstream sgRNA expression levels were decreased relative to Cas9 levels in muscle compared to heart tissue (FIGS. 17A and 17B).

[0784] Similar experiments were performed with a variety of sgRNAs (see spacer sequences in Table 19; FIGS. 18A-18C) and Cas12i2 endonuclease in exon 45 in HEK293FT cells.

TABLE 19

| | Protospacer sequences (a comma |
|---|---|
| sgRNA ID | separates the two protospacer sequences) |
| E45CAS12I2TTN26_E45CAS12I2TTN39 | TTCCCCAGTTGCATTCAATG (SEQ ID NO: 555), |
| | GGCAGCGGCAAACTGTTGTC (SEQ ID NO: 556) |
| E45CAS12I2TTN27_E45CAS12I2TTN39 | CCCAGTTGCATTCAATGTTC (SEQ ID NO: 557), |
| | GGCAGCGGCAAACTGTTGTC (SEQ ID NO: 556) |
| E45CAS12I2TTN29_E45CA512I2TTN43 | AATGTTCTGACAACAGTTTG (SEQ ID NO: 558), |
| | TGGTATCTTACAGGAACTCC (SEQ ID NO: 559) |
| E45CAS12I2TTN27_E45CAS12I2TTN40 | CCCAGTTGCATTCAATGTTC (SEQ ID NO: 557), |
| | CAGGAACTCCAGGATGGCAT (SEQ ID NO: 560) |
| E45CAS12I2TTN19_E45CAS12I2TTN39 | TTGAGGATTGCTGAATTATT (SEQ ID NO: 561), |
| | GGCAGCGGCAAACTGTTGTC (SEQ ID NO: 556) |
| E45CAS12I2TTN26_E45CAS12I2TTN40 | TTCCCCAGTTGCATTCAATG (SEQ ID NO: 555), |
| | CAGGAACTCCAGGATGGCAT (SEQ ID NO: 560) |
| E45CAS12I2TTN39_E45CAS12I2TTN43 | GGCAGCGGCAAACTGTTGTC (SEQ ID NO: 556), |
| | TGGTATCTTACAGGAACTCC (SEQ ID NO: 559) |
| E45CAS12I2TTN19_E45CAS12I2TTN29 | TTGAGGATTGCTGAATTATT (SEQ ID NO: 561), |
| | AATGTTCTGACAACAGTTTG (SEQ ID NO: 558) |
| E45CAS12I2TTN17_E45CAS12I2TTN39 | CCTGTAGAATACTGGCATCT (SEQ ID NO: 562), |
| | GGCAGCGGCAAACTGTTGTC (SEQ ID NO: 556) |
| E45CAS12I2TTN18_E45CAS12I2TTN25 | CTGTAGAATACTGGCATCTG (SEQ ID NO: 563), |
| | CTTCCCCAGTTGCATTCAAT (SEQ ID NO: 564) |
| E45CAS12I2TTN15_E45CAS12I2TTN25 | TTCCTGTAGAATACTGGCAT (SEQ ID NO: 565), |
| | CTTCCCCAGTTGCATTCAAT (SEQ ID NO: 564) |
| E45CAS12I2TTN16_E45CAS12I2TTN26 | TCCTGTAGAATACTGGCATC (SEQ ID NO: 566), |
| | TTCCCCAGTTGCATTCAATG (SEQ ID NO: 555) |
| E45CAS12I2TTN16_E45CAS12I2TTN27 | TCCTGTAGAATACTGGCATC (SEQ ID NO: 566), |
| | CCCAGTTGCATTCAATGTTC (SEQ ID NO: 557) |
| E45CAS12I2TTN21_E45CAS12I2TTN43 | GAGGATTGCTGAATTATTTC (SEQ ID NO: 567), |
| | TGGTATCTTACAGGAACTCC (SEQ ID NO: 559) |
| E45CAS12I2TTN38_E45CAS12I2TTN43 | TCAGAACATTGAATGCAACT (SEQ ID NO: 568), |
| | TGGTATCTTACAGGAACTCC (SEQ ID NO: 559) |
| E45CAS12I2TTN18_E45CAS12I2TTN28 | CTGTAGAATACTGGCATCTG (SEQ ID NO: 563), |
| | CATTCAATGTTCTGACAACA (SEQ ID NO: 569) |
| E45CAS12I2TTN21_E45CAS12I2TTN32 | GAGGATTGCTGAATTATTTC (SEQ ID NO: 567), |
| | CCGCTGCCCAATGCCATCCT (SEQ ID NO: 570) |
| E45CAS12I2TTN26_E45CAS12I2TTN36 | TTCCCCAGTTGCATTCAATG (SEQ ID NO: 555), |
| | AGCAATCCTCAAAAACAGAT (SEQ ID NO: 571) |
| E45CAS12I2TTN32_E45CAS12I2TTN38 | CCGCTGCCCAATGCCATCCT (SEQ ID NO: 570), |
| | TCAGAACATTGAATGCAACT (SEQ ID NO: 568) |
| E45CAS12I2TTN15_E45CAS12I2TTN28 | TTCCTGTAGAATACTGGCAT (SEQ ID NO: 565), |
| | CATTCAATGTTCTGACAACA (SEQ ID NO: 569) |
| E45CAS12I2TTN27_E45CAS12I2TTN36 | CCCAGTTGCATTCAATGTTC (SEQ ID NO: 557), |
| | AGCAATCCTCAAAAACAGAT (SEQ ID NO: 571) |
| E45CAS12I2TTN17_E45CAS12I2TTN29 | CCTGTAGAATACTGGCATCT (SEQ ID NO: 562), |
| | AATGTTCTGACAACAGTTTG (SEQ ID NO: 558) |
| E45CAS12I2TTN18_E45CAS12I2TTN40 | CTGTAGAATACTGGCATCTG (SEQ ID NO: 563), |
| | CAGGAACTCCAGGATGGCAT (SEQ ID NO: 560) |
| E45CAS12I2TTN15_E45CAS12I2TTN40 | TTCCTGTAGAATACTGGCAT (SEQ ID NO: 565), |
| | CAGGAACTCCAGGATGGCAT (SEQ ID NO: 560) |
| E45CAS12I2TTN18_E45CAS12I2TTN30 | CTGTAGAATACTGGCATCTG (SEQ ID NO: 563), |
| | TGACAACAGTTTGCCGCTGC (SEQ ID NO: 572) |
| E45CAS12I2TTN15_E45CAS12I2TTN30 | TTCCTGTAGAATACTGGCAT (SEQ ID NO: 565), |
| | TGACAACAGTTTGCCGCTGC (SEQ ID NO: 572) |
| E45CAS12I2TTN16_E45CAS12I2TTN43 | TCCTGTAGAATACTGGCATC (SEQ ID NO: 566), |
| | TGGTATCTTACAGGAACTCC (SEQ ID NO: 559) |
| E45CAS12I2TTN16_E45CAS12I2TTN32 | TCCTGTAGAATACTGGCATC (SEQ ID NO: 566), |
| | CCGCTGCCCAATGCCATCCT (SEQ ID NO: 570) |
| E45CAS12I2TTN11_E45CAS12I2TTN25 | GCAGACCTCCTGCCACCGCA (SEQ ID NO: 573), |
| | CTTCCCCAGTTGCATTCAAT (SEQ ID NO: 564) |
| E45CAS12I2TTN12_E45CAS12I2TTN26 | CAGACCTCCTGCCACCGCAG (SEQ ID NO: 574), |
| | TTCCCCAGTTGCATTCAATG (SEQ ID NO: 555) |
| E45CAS12I2TTN26_E45CAS12I2TTN35 | TTCCCCAGTTGCATTCAATG (SEQ ID NO: 555), |
| | TACAGGAAAAATTGGGAAGC (SEQ ID NO: 575) |
| E45CAS12I2TTN36_E45CA512I2TTN43 | AGCAATCCTCAAAAACAGAT (SEQ ID NO: 571), |
| | TGGTATCTTACAGGAACTCC (SEQ ID NO: 559) |
| E45CAS12I2TTN12_E45CAS12I2TTN27 | CAGACCTCCTGCCACCGCAG (SEQ ID NO: 574), |
| | CCCAGTTGCATTCAATGTTC (SEQ ID NO: 557) |
| E45CAS12I2TTN27_E45CAS12I2TTN35 | CCCAGTTGCATTCAATGTTC (SEQ ID NO: 557), |
| | TACAGGAAAAATTGGGAAGC (SEQ ID NO: 575) |
| E45CAS12I2TTN32_E45CAS12I2TTN36 | CCGCTGCCCAATGCCATCCT (SEQ ID NO: 570), |
| | AGCAATCCTCAAAAACAGAT (SEQ ID NO: 571) |
| E45CAS12I2TTN11_E45CAS12I2TTN28 | GCAGACCTCCTGCCACCGCA (SEQ ID NO: 573), |
| | CATTCAATGTTCTGACAACA (SEQ ID NO: 569) |
| E45CAS12I2TTN34_E45CAS12I2TTN39 | GGAAGCCTGAATCTGCGGTG (SEQ ID NO: 576), |
| | GGCAGCGGCAAACTGTTGTC (SEQ ID NO: 556) |
| E45CAS12I2TTN39_E45CAS12I2TTN7 | GGCAGCGGCAAACTGTTGTC (SEQ ID NO: 556), |
| | TTCTGTCTGACAGCTGTTTG (SEQ ID NO: 577) |
| E45CAS12I2TTN11_E45CAS12I2TTN40 | GCAGACCTCCTGCCACCGCA (SEQ ID NO: 573), |
| | CAGGAACTCCAGGATGGCAT (SEQ ID NO: 560) |
| E45CAS12I2TTN11_E45CAS12I2TTN30 | GCAGACCTCCTGCCACCGCA (SEQ ID NO: 573), |
| | TGACAACAGTTTGCCGCTGC (SEQ ID NO: 572) |
| E45CAS12I2TTN12_E45CAS12I2TTN43 | CAGACCTCCTGCCACCGCAG (SEQ ID NO: 574), |
| | TGGTATCTTACAGGAACTCC (SEQ ID NO: 559) |
| E45CAS12I2TTN29_E45CAS12I2TTN34 | AATGTTCTGACAACAGTTTG (SEQ ID NO: 558), |
| | GGAAGCCTGAATCTGCGGTG (SEQ ID NO: 576) |
| E45CAS12I2TTN35_E45CAS12I2TTN43 | TACAGGAAAAATTGGGAAGC (SEQ ID NO: 575), |
| | TGGTATCTTACAGGAACTCC (SEQ ID NO: 559) |
| E45CAS12I2TTN29_E45CAS12I2TTN7 | AATGTTCTGACAACAGTTTG (SEQ ID NO: 558), |
| | TTCTGTCTGACAGCTGTTTG (SEQ ID NO: 577) |
| E45CAS12I2TTN12_E45CAS12I2TTN32 | CAGACCTCCTGCCACCGCAG (SEQ ID NO: 574), |
| | CCGCTGCCCAATGCCATCCT (SEQ ID NO: 570) |
| E45CAS12I2TTN32_E45CAS12I2TTN35 | CCGCTGCCCAATGCCATCCT (SEQ ID NO: 570), |
| | TACAGGAAAAATTGGGAAGC (SEQ ID NO: 575) |

[0785] This description and exemplary embodiments should not be taken as limiting. For the purposes of this specification and appended claims, unless otherwise indicated, all numbers expressing quantities, percentages, or proportions, and other numerical values used in the specification and claims, are to be understood as being modified in all instances by the term “about,” to the extent they are not already so modified. Accordingly, unless indicated to the contrary, the numerical parameters set forth in the following specification and attached claims are approximations that may vary depending upon the desired properties sought to be obtained. At the very least, and not as an attempt to limit the application of the doctrine of equivalents to the scope of the claims, each numerical parameter should at least be construed in light of the number of reported significant digits and by applying ordinary rounding techniques.

[0786] It is noted that, as used in this specification and the appended claims, the singular forms “a,” “an,” and “the,” and any singular use of any word, include plural referents unless expressly and unequivocally limited to one referent. As used herein, the term “include” and its grammatical variants are intended to be non-limiting, such that recitation of items in a list is not to the exclusion of other like items that can be substituted or added to the listed items.

1. A composition comprising:
a. a single nucleic acid molecule comprising:
i. a nucleic acid encoding Staphylococcus aureus Cas9 (SaCas9) or Staphylococcus lugdunensis (SluCas9) and at least one, at least two, or at least three guide RNAs; or
ii. a nucleic acid encoding Staphylococcus aureus Cas9 (SaCas9) or Staphylococcus lugdunensis (SluCas9) and from one to n guide RNAs, wherein n is no more than the maximum number of guide RNAs that can be expressed from said nucleic acid; or
iii. a nucleic acid encoding Staphylococcus aureus Cas9 (SaCas9) or Staphylococcus lugdunensis (SluCas9) and 1, 2, or 3 guide RNAs; or
b. two nucleic acid molecules comprising:
i. a first nucleic acid encoding Staphylococcus aureus Cas9 (SaCas9) or Staphylococcus lugdunensis (SluCas9); and
a second nucleic acid that does not encode a SaCas9 or SluCas9 and encodes any one of the following:
1. at least one, at least two, at least three, at least four, at least five, or at least six guide RNAs; or
2. from one to n guide RNAs, wherein n is no more than the maximum number of guide RNAs that can be expressed from said nucleic acid; or
3. from one to six guide RNAs; or
ii. a first nucleic acid encoding Staphylococcus aureus Cas9 (SaCas9) or Staphylococcus lugdunensis (SluCas9) and
1. at least one, at least two, or at least three guide RNAs; or
2. from one to n guide RNAs, wherein n is no more than the maximum number of guide RNAs that can be expressed from said nucleic acid; or
3. 1, 2, or 3 guide RNAs; and
a second nucleic acid that does not encode a SaCas9 or SluCas9, optionally wherein the second nucleic acid comprises any one of the following:
1. at least one, at least two, at least three, at least four, at least five, or at least six guide RNAs; or
2. from one to n guide RNAs, wherein n is no more than the maximum number of guide RNAs that can be expressed from said nucleic acid; or
3. from one to six guide RNAs; or
iii. a first nucleic acid encoding Staphylococcus aureus Cas9 (SaCas9) or Staphylococcus lugdunensis (SluCas9) and at least one, at least two, or at least three guide RNAs; and
a second nucleic acid that does not encode a SaCas9 or SluCas9 and encodes from one to six guide RNAs; or
iv. a first nucleic acid encoding Staphylococcus aureus Cas9 (SaCas9) or Staphylococcus lugdunensis (SluCas9) and at least two guide RNAs, wherein at least one guide RNA binds upstream of a target sequence and at least one guide RNA binds downstream of the target sequence; and
a second nucleic acid that does not encode a SaCas9 or SluCas9 and encodes at least one additional copy of each of the guide RNAs encoded in the first nucleic acid,
wherein the guide RNA(s) target a region in the dystrophin gene.

2. A composition comprising two nucleic acid molecules comprising i) a first nucleic acid encoding Staphylococcus aureus Cas9 (SaCas9) or Staphylococcus lugdunensis Cas9 (SluCas9); and ii) a second nucleic acid encoding at least 2 or at least 3 copies of a first guide RNA and at least 2 or at least 3 copies of a second guide RNA, wherein the first and second guide RNA function to excise a portion of a DMD gene.

3. A composition comprising one or more nucleic acid molecules encoding an Staphylococcus aureus Cas9 (SaCas9) or Staphylococcus lugdunensis Cas9 (SluCas9) and a pair of guide RNAs, wherein each guide RNA targets a different sequence in a DMD gene, wherein the endonuclease and pair of guide RNAs are capable of excising a DNA fragment from the DMD gene; wherein the DNA fragment is between 5-250 nucleotides in length.

4-6. (canceled)

7. The composition of claim 3, wherein the excised DNA fragment comprises a splice acceptor site, splice donor site, a premature stop codon, or wherein the excised DNA fragment does not comprise an entire exon of the DMD gene.

8-10. (canceled)

11. The composition of claim 1, comprising a single nucleic acid molecule encoding one or more guide RNAs and a Cas9, wherein the single nucleic acid molecule comprises:
a. a first nucleic acid encoding one or more spacer sequences selected from any one of SEQ ID NOs: 1-35, 1000-1078, or 3000-3069 and a second nucleic acid encoding a Staphylococcus aureus Cas9 (SaCas9); or
b. a first nucleic acid encoding one or more spacer sequences selected from any one of SEQ ID NOs: 100-225, 2000-2116, or 4000-4251 and a second nucleic acid encoding a Staphylococcus lugdunensis Cas9 (SluCas9); or
c. a first nucleic acid encoding one or more spacer sequences comprising at least 20 contiguous nucleotides of a spacer sequence selected from any one of SEQ ID NOs: 1-35, 1000-1078, or 3000-3069 and a second nucleic acid encoding a Staphylococcus aureus Cas9 (SaCas9); or
d. a first nucleic acid encoding one or more spacer sequences comprising at least 20 contiguous nucleotides of a spacer sequence selected from any one of SEQ ID NOs: 100-225, 2000-2116, or 4000-4251 and a second nucleic acid encoding a Staphylococcus lugdunensis Cas9 (SluCas9); or
e. a first nucleic acid encoding one or more spacer sequences that is at least 90% identical to any one of SEQ ID NOs: 1-35, 1000-1078, or 3000-3069 and a second nucleic acid encoding a Staphylococcus aureus Cas9 (SaCas9); or
f. a first nucleic acid encoding one or more spacer sequences that is at least 90% identical to any one of SEQ ID NOs: 100-225, 2000-2116, or 4000-4251 and a second nucleic acid encoding a Staphylococcus lugdunensis Cas9 (SluCas9); or
g. a first nucleic acid encoding a pair of guide RNAs comprising a first and second spacer sequence selected from any one of the following pairs of spacer sequences: SEQ ID NOs: 10 and 15; 10 and 16; 12 and 16; 1001 and 1005; 1001 and 15; 1001 and 16; 1003 and 1005; 16 and 1003; 12 and 1010; 12 and 1012; 12 and 1013; 10 and 1016; 1017 and 1005; 1017 and 16; 1018 and 16; 15 and 10; 16 and 10; 16 and 12; 1005 and 1001; 15 and 1001; 16 and 1001; 1005 and 1003; 1003 and 16; 1010 and 12; 1012 and 12; 1013 and 12; 1016 and 10; 1005 and 1017; 16 and 1017; and 16 and 1018; and a second nucleic acid encoding a Staphylococcus aureus Cas9 (SaCas9); or
h. a first nucleic acid encoding a pair of guide RNAs comprising at least 17, 18, 19, 20, or 21 contiguous nucleotides of a first and second spacer sequence selected from any one of the following pairs of spacer sequences: SEQ ID NOs: 10 and 15; 10 and 16; 12 and 16; 1001 and 1005; 1001 and 15; 1001 and 16; 1003 and 1005; 16 and 1003; 12 and 1010; 12 and 1012; 12 and 1013; 10 and 1016; 1017 and 1005; 1017 and 16; 1018 and 16; 15 and 10; 16 and 10; 16 and 12; 1005 and 1001; 15 and 1001; 16 and 1001; 1005 and 1003; 1003 and 16; 1010 and 12; 1012 and 12; 1013 and 12; 1016 and 10; 1005 and 1017; 16 and 1017; and 16 and 1018; and a second nucleic acid encoding a Staphylococcus aureus Cas9 (SaCas9); or
i. a first nucleic acid encoding a pair of guide RNAs that is at least 90% identical to a first and second spacer sequence selected from any one of the following pairs of spacer sequences: SEQ ID NOs: 10 and 15; 10 and 16; 12 and 16; 1001 and 1005; 1001 and 15; 1001 and 16; 1003 and 1005; 16 and 1003; 12 and 1010; 12 and 1012; 12 and 1013; 10 and 1016; 1017 and 1005; 1017 and 16; 1018 and 16; 15 and 10; 16 and 10; 16 and 12; 1005 and 1001; 15 and 1001; 16 and 1001; 1005 and 1003; 1003 and 16; 1010 and 12; 1012 and 12; 1013 and 12; 1016 and 10; 1005 and 1017; 16 and 1017; and 16 and 1018; and a second nucleic acid encoding a Staphylococcus aureus Cas9 (SaCas9); or
j. a first nucleic acid encoding a pair of guide RNAs comprising a first and second spacer sequence selected from any one of the following pairs of spacer sequences: SEQ ID NOs: 148 and 134; 149 and 135; 150 and 135; 131 and 136; 151 and 136; 139 and 131; 139 and 151; 140 and 131; 140 and 151; 141 and 148; 144 and 149; 144 and 150; 145 and 131; 145 and 151; 146 and 148; 134 and 148; 135 and 149; 135 and 150; 136 and 131; 136 and 151; 131 and 139; 151 and 139; 131 and 140; 151 and 140; 148 and 141; 149 and 144; 150 and 144; 131 and 145; 151 and 145; and 148 and 146; and a second nucleic acid encoding a Staphylococcus lugdunensis Cas9 (SluCas9); or
k. a first nucleic acid encoding a pair of guide RNAs comprising at least 17, 18, 19, 20, or 21 contiguous nucleotides of a first and second spacer sequence selected from any one of the following pairs of spacer sequences: SEQ ID NOs: 148 and 134; 149 and 135; 150 and 135; 131 and 136; 151 and 136; 139 and 131; 139 and 151; 140 and 131; 140 and 151; 141 and 148; 144 and 149; 144 and 150; 145 and 131; 145 and 151; 146 and 148; 134 and 148; 135 and 149; 135 and 150; 136 and 131; 136 and 151; 131 and 139; 151 and 139; 131 and 140; 151 and 140; 148 and 141; 149 and 144; 150 and 144; 131 and 145; 151 and 145; and 148 and 146; and a second nucleic acid encoding a Staphylococcus lugdunensis Cas9 (SluCas9); or
l. a first nucleic acid encoding a pair of guide RNAs that is at least 90% identical to a first and second spacer sequence selected from any one of the following pairs of spacer sequences: SEQ ID NOs: 148 and 134; 149 and 135; 150 and 135; 131 and 136; 151 and 136; 139 and 131; 139 and 151; 140 and 131; 140 and 151; 141 and 148; 144 and 149; 144 and 150; 145 and 131; 145 and 151; 146 and 148; 134 and 148; 135 and 149; 135 and 150; 136 and 131; 136 and 151; 131 and 139; 151 and 139; 131 and 140; 151 and 140; 148 and 141; 149 and 144; 150 and 144; 131 and 145; 151 and 145; and 148 and 146; and a second nucleic acid encoding a Staphylococcus lugdunensis Cas9 (SluCas9); or
m. a first nucleic acid encoding a pair of guide RNAs that is at least 90% identical to a first and second spacer sequence selected from any one of the following pairs of spacer sequences:
i. SEQ ID NOS: 148 and 134,
ii. SEQ ID Nos: 145 and 131,
iii. SEQ ID Nos: 144 and 149;
iv. SEQ ID Nos: 144 and 150;
v. SEQ ID Nos: 146 and 148;
and a second nucleic acid encoding a Staphylococcus lugdunensis Cas9 (SluCas9); or
n. a first nucleic acid encoding a pair of guide RNAs that is at least 90% identical to a first and second spacer sequence selected from any one of the following pairs of spacer sequences:
i. SEQ ID NOs: 12 and 1013; and
ii. SEQ ID Nos: 12 and 1016;
and a second nucleic acid encoding a SaCas9-KKH.

12. The composition of claim 11, comprising one or more nucleic acid molecules encoding a Staphylococcus lugdunensis Cas9 (SluCas9) and at least two guide RNAs, wherein a first and second guide RNA target different sequences in a DMD gene, wherein the first and a second guide RNA comprise a sequence that is at least 90% identical to a first and second spacer sequence selected from any one of the following pairs of spacer sequences:
i. SEQ ID NOS: 148 and 134,
ii. SEQ ID Nos: 145 and 131,
iii. SEQ ID Nos: 144 and 149;
iv. SEQ ID Nos: 144 and 150;
v. SEQ ID Nos: 146 and 148.

13. The composition of claim 11, comprising one or more nucleic acid molecules encoding an endonuclease and at least two guide RNAs, wherein the guide RNAs each target a different sequence in a DMD gene, wherein the guide RNAs each comprise a sequence that is at least 90% identical to a first and second spacer sequence selected from any one of the following pairs of spacer sequences:
i. SEQ ID NOs: 12 and 1013; and
ii. SEQ ID Nos: 12 and 1016; and
a second nucleic acid encoding a SaCas9-KKH.

14. The composition of claim 1, wherein the first and/or the second nucleic acid, if present, encodes at least two, at least three, at least four, at least five, or at least six guide RNAs.

15-24. (canceled)

25. The composition of claim 1, wherein the second nucleic acid, if present, encodes 1) from one to n guide RNAs, wherein n is no more than the maximum number of guide RNAs that can be expressed from said nucleic acid; 2) from one to six guide RNAs; 3) 2-10, 2-9, 2-8, 2-7, 2-6, 2-5, 2-4, or 2-3 guide RNAs; or 4) 2, 3, 4, 5, or 6 guide RNAs.

26-41. (canceled)

42. The composition of claim 1, wherein the composition comprises at least two nucleic acid molecules, wherein the first nucleic acid molecule comprises a sequence encoding an endonuclease, wherein the second nucleic acid molecule encodes a first guide RNA and a second guide RNA, wherein the first guide RNA and the second guide RNA are not the same sequence, and wherein the second nucleic acid molecule does not encode an endonuclease, wherein the first nucleic acid molecule encodes a Staphylococcus aureus Cas9 (SaCas9) endonuclease, and wherein the first guide RNA comprises the first sequence and the second guide RNAs comprises the second sequence from any one the following pairs of sequences: SEQ ID NOs: 10 and 15; 10 and 16; 12 and 16; 1001 and 1005; 1001 and 15; 1001 and 16; 1003 and 1005; 16 and 1003; 12 and 1010; 12 and 1012; 12 and 1013; 10 and 1016; 1017 and 1005; 1017 and 16; 1018 and 16; 15 and 10; 16 and 10; 16 and 12; 1005 and 1001; 15 and 1001; 16 and 1001; 1005 and 1003; 1003 and 16; 1010 and 12; 1012 and 12; 1013 and 12; 1016 and 10; 1005 and 1017; 16 and 1017; and 16 and 1018.

43. (canceled)

44. The composition of claim 1, wherein the composition comprises at least two nucleic acid molecules, wherein the first nucleic acid molecule comprises a sequence encoding an endonuclease, wherein the second nucleic acid molecule encodes a first guide RNA and a second guide RNA, wherein the first guide RNA and the second guide RNA are not the same sequence, and wherein the second nucleic acid molecule does not encode an endonuclease, wherein the first nucleic acid molecule encodes a Staphylococcus lugdunensis Cas9 (SluCas9) endonuclease, and wherein the first guide RNA comprises the first sequence and the second guide RNAs comprises the second sequence from any one the following pairs of sequences: SEQ ID NOs: 148 and 134; 149 and 135; 150 and 135; 131 and 136; 151 and 136; 139 and 131; 139 and 151; 140 and 131; 140 and 151; 141 and 148; 144 and 149; 144 and 150; 145 and 131; 145 and 151; 146 and 148; 134 and 148; 135 and 149; 135 and 150; 136 and 131; 136 and 151; 131 and 139; 151 and 139; 131 and 140; 151 and 140; 148 and 141; 149 and 144; 150 and 144; 131 and 145; 151 and 145; and 148 and 146.

45-94. (canceled)

95. The composition of claim 1, wherein the single nucleic acid molecule or the first nucleic acid comprises from 5′ to 3′ with respect to the plus strand: the reverse complement of a nucleotide sequence encoding a first guide RNA scaffold sequence, the reverse complement of a nucleotide sequence encoding the first guide RNA sequence, the reverse complement of a promoter for expression of the nucleotide sequence encoding the first guide RNA sequence, a promoter for expression of a nucleotide sequence encoding Staphylococcus aureus Cas9 (SaCas9) or Staphylococcus lugdunensis Cas9 (SluCas9), a nucleotide sequence encoding the SaCas9 or SluCas9, a polyadenylation sequence, a promoter for expression of the second guide RNA in the same direction as the promoter for the SaCas9 or SluCas9, a nucleotide sequence encoding the second guide RNA sequence, and a nucleotide sequence encoding the second guide RNA scaffold sequence.

96-101. (canceled)

102. The composition of claim 95, wherein the scaffold sequence for the first and/or second guide RNA comprises the sequence of SEQ ID NO: 901.

103. (canceled)

104. An AAV9 vector comprising any of the nucleic acids recited in claim 1, wherein the AAV9 vector is less than 5 kb, less than 4.9 kb, 4.85, 4.8, or 4.75 kb in size from ITR to ITR, inclusive of both ITRs.

105. The AAV9 vector of claim 104, wherein the AAV9 vector is between 3.9-5 kb, 4-5 kb, 4.2-5 kb, 4.4-5 kb, 4.6-5 kb, 4.7-5 kb, 3.9-4.9 kb, 4.2-4.9 kb, 4.4-4.9 kb, 4.7-4.9 kb, 3.9-4.85 kb, 4.2-4.85 kb, 4.4-4.85 kb, 4.6-4.85 kb, 4.7-4.85 kb, 4.7-4.9 kb, 3.9-4.8 kb, 4.2-4.8 kb, 4.4-4.8 kb or 4.6-4.8 kb in size from ITR to ITR, inclusive of both ITRs.

106. (canceled)

107. A composition comprising a guide RNA encoded by a sequence comprising any one of:
a. SEQ ID NOs: 1-24, 1000-1078, or 3000-3048 or complements thereof; or
b. SEQ ID NOs: 100-200, 2000-2116, or 4000-4201 or complements thereof.

108. A composition comprising a guide RNA encoded by a sequence comprising any one of:
a. SEQ ID NOs: 25-35 or 201-225, or complements thereof;
b. SEQ ID NOs: 201-225, or 4202-4251 or complements thereof.

109-110. (canceled)

111. A method of treating Duchenne Muscular Dystrophy (DMD), the method comprising delivering to a cell the composition of claim 1.

112-115. (canceled)

116. The method of claim 111, wherein the single nucleic acid molecule is delivered to the cell on a single vector.

117. The method of claim 111, comprising a nucleic acid molecule encoding SaCas9, wherein the spacer sequence is selected from any one of SEQ ID NOs: 12, 15, 16, 20, 27, 28, 32, 33, and 35.

118. The method of claim 111, comprising a nucleic acid molecule encoding SaCas9, wherein the SaCas9 comprises an amino acid sequence that is at least 80%, 85%, 90%, 91%, 92%, 93%, 94%, 95%, 96%, 97%, 98%, 99% or 100% identical to the amino acid sequence of SEQ ID NO: 711.

119. (canceled)

120. The method of claim 111, comprising a nucleic acid molecule encoding SaCas9, wherein the SaCas9 comprises an amino acid sequence that is at least 80%, 85%, 90%, 91%, 92%, 93%, 94%, 95%, 96%, 97%, 98%, 99% or 100% identical to an amino acid sequence selected from any one of SEQ ID NOs: 715-717.

121. The method of claim 111, comprising a nucleic acid molecule encoding SluCas9, wherein the spacer sequence is selected from any one of SEQ ID NOs: 131, 134, 135, 136, 139, 144, 148, 149, 150, 151, 179, 184, 201, 210, 223, 224, and 225.

122. The method of claim 111, comprising a nucleic acid molecule encoding SluCas9, wherein the SluCas9 comprises an amino acid sequence that is at least 80%, 85%, 90%, 91%, 92%, 93%, 94%, 95%, 96%, 97%, 98%, 99% or 100% identical to the amino acid sequence of SEQ ID NO: 712.

123. (canceled)

124. The method of claim 111, comprising a nucleic acid molecule encoding SluCas9, wherein the SluCas9 comprises an amino acid sequence that is at least 80%, 85%, 90%, 91%, 92%, 93%, 94%, 95%, 96%, 97%, 98%, 99% or 100% identical to an amino acid sequence selected from any one of SEQ ID NOs: 718-720.

125. A method of excising a portion of an exon with a premature stop codon in a subject with Duchenne Muscular Dystrophy (DMD), the method comprising delivering to a cell a single nucleic acid molecule comprising:
i) a nucleic acid encoding a pair of guide RNAs wherein the first guide RNA binds to a target sequence within the exon that is upstream of the premature stop codon, and wherein the second guide RNA binds to a sequence that is downstream of the premature stop codon and downstream of the sequence bound by the first guide RNA; and
a. a nucleic acid encoding a Staphylococcus aureus Cas9 (SaCas9); or
b. a nucleic acid encoding a Staphylococcus lugdunensis Cas9 (SluCas9);
wherein the pair of guide RNAs and Cas9 excise a portion of the exon.

126-131. (canceled)

132. The method of claim 125, wherein a portion of a DMD gene is excised, wherein the portion is within exon 43, 44, 45, 50, 51, or 53.

133. The method of claim 125, comprising a pair of guide RNAs, wherein the pair of guide RNA comprise a first and second spacer sequence selected from any one of SEQ ID NOs: 10 and 15; 10 and 16; 12 and 16; 1001 and 1005; 1001 and 15; 1001 and 16; 1003 and 1005; 16 and 1003; 12 and 1010; 12 and 1012; 12 and 1013; 10 and 1016; 1017 and 1005; 1017 and 16; 1018 and 16; 15 and 10; 16 and 10; 16 and 12; 1005 and 1001; 15 and 1001; 16 and 1001; 1005 and 1003; 1003 and 16; 1010 and 12; 1012 and 12; 1013 and 12; 1016 and 10; 1005 and 1017; 16 and 1017; and 16 and 1018 148 and 134; 149 and 135; 150 and 135; 131 and 136; 151 and 136; 139 and 131; 139 and 151; 140 and 131; 140 and 151; 141 and 148; 144 and 149; 144 and 150; 145 and 131; 145 and 151; 146 and 148; 134 and 148; 135 and 149; 135 and 150; 136 and 131; 136 and 151; 131 and 139; 151 and 139; 131 and 140; 151 and 140; 148 and 141; 149 and 144; 150 and 144; 131 and 145; 151 and 145; and 148 and 146.

134-158. (canceled)

159. The composition of claim 2, wherein the first nucleic acid does not encode a guide RNA.

160. The composition of claim 2, wherein the first nucleic acid encodes a copy of the first guide RNA and a copy of the second guide RNA.

The application's sequence listing, which the Patent Office published only in electronic form, follows.

SEQUENCE LISTING (9014 sequences)

SEQ ID NO: 1 - DNA, 22 bp, Artificial Sequence
  Synthetic
gcaatgctgctgtcttcttgct

SEQ ID NO: 2 - DNA, 22 bp, Artificial Sequence
  Synthetic
aacaaaatgtacaaggaccgac

SEQ ID NO: 3 - DNA, 22 bp, Artificial Sequence
  Synthetic
tgcaaagtgcaacgcctgtgga

SEQ ID NO: 4 - DNA, 22 bp, Artificial Sequence
  Synthetic
atagtctacaacaaagctcagg

SEQ ID NO: 5 - DNA, 22 bp, Artificial Sequence
  Synthetic
ctgttttaaaatttttatatta

SEQ ID NO: 6 - DNA, 22 bp, Artificial Sequence
  Synthetic
atttagcatgttcccaattctc

SEQ ID NO: 7 - DNA, 22 bp, Artificial Sequence
  Synthetic
aatcgcctgcaggtaaaagcat

SEQ ID NO: 8 - DNA, 22 bp, Artificial Sequence
  Synthetic
tctcagaaagacacaaattcct

SEQ ID NO: 9 - DNA, 22 bp, Artificial Sequence
  Synthetic
tcaggcttcccaatttttcctg

SEQ ID NO: 10 - DNA, 22 bp, Artificial Sequence
  Synthetic
tagaatactggcatctgttttt

SEQ ID NO: 11 - DNA, 22 bp, Artificial Sequence
  Synthetic
tggcatctgtttttgaggattg

SEQ ID NO: 12 - DNA, 22 bp, Artificial Sequence
  Synthetic
ttgccgctgcccaatgccatcc

SEQ ID NO: 13 - DNA, 22 bp, Artificial Sequence
  Synthetic
gaggtagggcgacagatctaat

SEQ ID NO: 14 - DNA, 22 bp, Artificial Sequence
  Synthetic
tctacaggaaaaattgggaagc

SEQ ID NO: 15 - DNA, 22 bp, Artificial Sequence
  Synthetic
gcggcaaactgttgtcagaaca

SEQ ID NO: 16 - DNA, 22 bp, Artificial Sequence
  Synthetic
ttttggtatcttacaggaactc

SEQ ID NO: 17 - DNA, 22 bp, Artificial Sequence
  Synthetic
actattggagcctgtaagtata

SEQ ID NO: 18 - DNA, 22 bp, Artificial Sequence
  Synthetic
aggaagttagaagatctgagct

SEQ ID NO: 19 - DNA, 22 bp, Artificial Sequence
  Synthetic
tagtaaccacaggttgtgtcac

SEQ ID NO: 20 - DNA, 22 bp, Artificial Sequence
  Synthetic
gttgtgtcaccagagtaacagt

SEQ ID NO: 21 - DNA, 22 bp, Artificial Sequence
  Synthetic
tctgagtaggagctaaaatatt

SEQ ID NO: 22 - DNA, 22 bp, Artificial Sequence
  Synthetic
gagggtgatggtgggtgacctt

SEQ ID NO: 23 - DNA, 22 bp, Artificial Sequence
  Synthetic
tataaaatcacagagggtgatg

SEQ ID NO: 24 - DNA, 22 bp, Artificial Sequence
  Synthetic
ttgatcaagttataaaatcaca

SEQ ID NO: 25 - DNA, 22 bp, Artificial Sequence
  Synthetic
ccttggtttctgtgattttctt

SEQ ID NO: 26 - DNA, 22 bp, Artificial Sequence
  Synthetic
tccttagcttccagccattgtg

SEQ ID NO: 27 - DNA, 22 bp, Artificial Sequence
  Synthetic
cttgtacttcatcccactgatt

SEQ ID NO: 28 - DNA, 22 bp, Artificial Sequence
  Synthetic
actgattctgaattctttcaac

SEQ ID NO: 29 - DNA, 22 bp, Artificial Sequence
  Synthetic
agccaagcttgagtcatggaag

SEQ ID NO: 30 - DNA, 22 bp, Artificial Sequence
  Synthetic
ttaggacaggccagagccaagc

SEQ ID NO: 31 - DNA, 22 bp, Artificial Sequence
  Synthetic
gcaacagttgaatgaaatgtta

SEQ ID NO: 32 - DNA, 22 bp, Artificial Sequence
  Synthetic
ccttcagaaccggaggcaacag

SEQ ID NO: 33 - DNA, 22 bp, Artificial Sequence
  Synthetic
agttgaaagaattcagaatcag

SEQ ID NO: 34 - DNA, 22 bp, Artificial Sequence
  Synthetic
ttttattctagttgaaagaatt

SEQ ID NO: 35 - DNA, 22 bp, Artificial Sequence
  Synthetic
tttttccttttattctagttga

SEQ ID NO: 36 - protein, 13 aa, Artificial Sequence
  Synthetic
PAAKKKKLDGSVD

SEQ ID NO: 37 - protein, 9 aa, Artificial Sequence
  Synthetic
PKKKRKVGS

SEQ ID NO: 38 - protein, 15 aa, Artificial Sequence
  Synthetic
PKKKRKVGIHGVPAA

SEQ ID NO: 39 - protein, 11 aa, Artificial Sequence
  Synthetic
GSGSPKKKRKV

SEQ ID NO: 40 - protein, 22 aa, Artificial Sequence
  Synthetic
TGGGPGGGAAAGSGSPKKKRKV

SEQ ID NO: 41 - protein, 20 aa, Artificial Sequence
  Synthetic
GSGSKRPAATKKAGQAKKKK

SEQ ID NO: 42 - DNA, 477 bp, Artificial Sequence
  Synthetic
cccgagtccaacacccgtgggaatcccatgggcaccatggcccctcgctccaaaaatgcttcgcgtcgcgcagacactgctcggtagtttcggggatcagcgtttgagtaagagcccgcgtctgaaccctccgcgccgccccggccccagtggaaagacgcgcaggcaaaacgcaccacgtgacggagcgtgaccgcgcgccgagcgcgcgccaaggtcgggcaggaagagggcctatttcccatgattccttcatatttgcatatacgatacaaggctgttagagagataattagaattaatttgactgtaaacacaaagatattagtacaaaatacgtgacgtagaaagtaataatttcttgggtagtttgcagttttaaaattatgttttaaaatggactatcatatgcttaccgtaacttgaaagtatttcgatttcttggctttatatatcttgtggaaaggacgaaacacc

SEQ ID NO: 43 - DNA, 314 bp, Artificial Sequence
  Synthetic
gatccgacgccgccatctctaggcccgcgccggccccctcgcacagacttgtgggagaagctcggctactcccctgccccggttaatttgcatataatatttcctagtaactatagaggcttaatgtgcgataaaagacagataatctgttctttttaatactagctacattttacatgataggcttggatttctataagagatacaaatactaaattattattttaaaaaacagcacaaaaggaaactcaccctaactgtaaagtaattgtgtgttttgagactataaatatcccttggagaaaagccttgtt

SEQ ID NO: 44 - DNA, 100 bp, Artificial Sequence
  Synthetic
catatttgcatgtcgctatgtgttctgggaaatcaccataaacgtgaaatgtctttggatttgggaatcttataagttctgtatgagaccacggtacacc

SEQ ID NO: 45 - DNA, 240 bp, Artificial Sequence
  Synthetic
ctgcagtatttagcatgccccacccatctgcaaggcattctggatagtgtcaaaacagccggaaatcaagtccgtttatctcaaactttagcattttgggaataaatgatatttgctatgctggttaaattagattttagttaaatttcctgctgaagctctagtacgataagtaacttgacctaagtgtaaagttgagatttccttcaggtttatatagcttgtgcgccgcctgggtac

SEQ ID NO: 46-99 - skipped (54 entries)

SEQ ID NO: 100 - DNA, 22 bp, Artificial Sequence
  Synthetic
atatatgtgttacctacccttg

SEQ ID NO: 101 - DNA, 22 bp, Artificial Sequence
  Synthetic
acattttgttaactttttccca

SEQ ID NO: 102 - DNA, 22 bp, Artificial Sequence
  Synthetic
ctttttcccattggaaatcaag

SEQ ID NO: 103 - DNA, 22 bp, Artificial Sequence
  Synthetic
tttttcccattggaaatcaagc

SEQ ID NO: 104 - DNA, 22 bp, Artificial Sequence
  Synthetic
tcctgtagcttcaccctttcca

SEQ ID NO: 105 - DNA, 22 bp, Artificial Sequence
  Synthetic
aatgtacaaggaccgacaaggg

SEQ ID NO: 106 - DNA, 22 bp, Artificial Sequence
  Synthetic
acaaaatgtacaaggaccgaca

SEQ ID NO: 107 - DNA, 22 bp, Artificial Sequence
  Synthetic
aacaaaatgtacaaggaccgac

SEQ ID NO: 108 - DNA, 22 bp, Artificial Sequence
  Synthetic
ggaaaaagttaacaaaatgtac

SEQ ID NO: 109 - DNA, 22 bp, Artificial Sequence
  Synthetic
tctctcccagcttgatttccaa

SEQ ID NO: 110 - DNA, 22 bp, Artificial Sequence
  Synthetic
ctctctcccagcttgatttcca

SEQ ID NO: 111 - DNA, 22 bp, Artificial Sequence
  Synthetic
gcctgtggaaagggtgaagcta

SEQ ID NO: 112 - DNA, 22 bp, Artificial Sequence
  Synthetic
gcaaagtgcaacgcctgtggaa

SEQ ID NO: 113 - DNA, 22 bp, Artificial Sequence
  Synthetic
tgcaaagtgcaacgcctgtgga

SEQ ID NO: 114 - DNA, 22 bp, Artificial Sequence
  Synthetic
agcattgcaaagtgcaacgcct

SEQ ID NO: 115 - DNA, 22 bp, Artificial Sequence
  Synthetic
atagtctacaacaaagctcagg

SEQ ID NO: 116 - DNA, 22 bp, Artificial Sequence
  Synthetic
aaagatagtctacaacaaagct

SEQ ID NO: 117 - DNA, 22 bp, Artificial Sequence
  Synthetic
tatttagcatgttcccaattct

SEQ ID NO: 118 - DNA, 22 bp, Artificial Sequence
  Synthetic
aacagatctgtcaaatcgcctg

SEQ ID NO: 119 - DNA, 22 bp, Artificial Sequence
  Synthetic
aatcgcctgcaggtaaaagcat

SEQ ID NO: 120 - DNA, 22 bp, Artificial Sequence
  Synthetic
tgctaaatacaaatggtatctt

SEQ ID NO: 121 - DNA, 22 bp, Artificial Sequence
  Synthetic
attgggaacatgctaaatacaa

SEQ ID NO: 122 - DNA, 22 bp, Artificial Sequence
  Synthetic
aaagacacaaattcctgagaat

SEQ ID NO: 123 - DNA, 22 bp, Artificial Sequence
  Synthetic
gaaagacacaaattcctgagaa

SEQ ID NO: 124 - DNA, 22 bp, Artificial Sequence
  Synthetic
atgatataaagatatttaatca

SEQ ID NO: 125 - DNA, 22 bp, Artificial Sequence
  Synthetic
ttgacagatctgttgagaaatg

SEQ ID NO: 126 - DNA, 22 bp, Artificial Sequence
  Synthetic
gatttgacagatctgttgagaa

SEQ ID NO: 127 - DNA, 22 bp, Artificial Sequence
  Synthetic
ttgatccatatgcttttacctg

SEQ ID NO: 128 - DNA, 22 bp, Artificial Sequence
  Synthetic
agacctcctgccaccgcagatt

SEQ ID NO: 129 - DNA, 22 bp, Artificial Sequence
  Synthetic
tcccaatttttcctgtagaata

SEQ ID NO: 130 - DNA, 22 bp, Artificial Sequence
  Synthetic
tagaatactggcatctgttttt

SEQ ID NO: 131 - DNA, 22 bp, Artificial Sequence
  Synthetic
tttgccgctgcccaatgccatc

SEQ ID NO: 132 - DNA, 22 bp, Artificial Sequence
  Synthetic
ggagttcctgtaagataccaaa

SEQ ID NO: 133 - DNA, 22 bp, Artificial Sequence
  Synthetic
agaggtagggcgacagatctaa

SEQ ID NO: 134 - DNA, 22 bp, Artificial Sequence
  Synthetic
ctgtcagacagaaaaaagaggt

SEQ ID NO: 135 - DNA, 22 bp, Artificial Sequence
  Synthetic
gctgtcagacagaaaaaagagg

SEQ ID NO: 136 - DNA, 22 bp, Artificial Sequence
  Synthetic
aacagctgtcagacagaaaaaa

SEQ ID NO: 137 - DNA, 22 bp, Artificial Sequence
  Synthetic
aagcctgaatctgcggtggcag

SEQ ID NO: 138 - DNA, 22 bp, Artificial Sequence
  Synthetic
gggaagcctgaatctgcggtgg

SEQ ID NO: 139 - DNA, 22 bp, Artificial Sequence
  Synthetic
aattgggaagcctgaatctgcg

SEQ ID NO: 140 - DNA, 22 bp, Artificial Sequence
  Synthetic
aaaaattgggaagcctgaatct

SEQ ID NO: 141 - DNA, 22 bp, Artificial Sequence
  Synthetic
gccagtattctacaggaaaaat

SEQ ID NO: 142 - DNA, 22 bp, Artificial Sequence
  Synthetic
tgccagtattctacaggaaaaa

SEQ ID NO: 143 - DNA, 22 bp, Artificial Sequence
  Synthetic
aaaaacagatgccagtattcta

SEQ ID NO: 144 - DNA, 22 bp, Artificial Sequence
  Synthetic
tgtcagaacattgaatgcaact

SEQ ID NO: 145 - DNA, 22 bp, Artificial Sequence
  Synthetic
ttgtcagaacattgaatgcaac

SEQ ID NO: 146 - DNA, 22 bp, Artificial Sequence
  Synthetic
gttgtcagaacattgaatgcaa

SEQ ID NO: 147 - DNA, 22 bp, Artificial Sequence
  Synthetic
aactccaggatggcattgggca

SEQ ID NO: 148 - DNA, 22 bp, Artificial Sequence
  Synthetic
tacaggaactccaggatggcat

SEQ ID NO: 149 - DNA, 22 bp, Artificial Sequence
  Synthetic
ttacaggaactccaggatggca

SEQ ID NO: 150 - DNA, 22 bp, Artificial Sequence
  Synthetic
ggtatcttacaggaactccagg

SEQ ID NO: 151 - DNA, 22 bp, Artificial Sequence
  Synthetic
ttttggtatcttacaggaactc

SEQ ID NO: 152 - DNA, 22 bp, Artificial Sequence
  Synthetic
gttttgcctttttggtatctta

SEQ ID NO: 153 - DNA, 22 bp, Artificial Sequence
  Synthetic
tcttttctcaaataaaaagaca

SEQ ID NO: 154 - DNA, 22 bp, Artificial Sequence
  Synthetic
agaatgggatccagtatactta

SEQ ID NO: 155 - DNA, 22 bp, Artificial Sequence
  Synthetic
agtatacttacaggctccaata

SEQ ID NO: 156 - DNA, 22 bp, Artificial Sequence
  Synthetic
caggctccaatagtggtcagtc

SEQ ID NO: 157 - DNA, 22 bp, Artificial Sequence
  Synthetic
caatagtggtcagtccaggagc

SEQ ID NO: 158 - DNA, 22 bp, Artificial Sequence
  Synthetic
gtggtcagtccaggagctaggt

SEQ ID NO: 159 - DNA, 22 bp, Artificial Sequence
  Synthetic
ttgccctcagctcttgaagtaa

SEQ ID NO: 160 - DNA, 22 bp, Artificial Sequence
  Synthetic
agtatactggatcccattctct

SEQ ID NO: 161 - DNA, 22 bp, Artificial Sequence
  Synthetic
actattggagcctgtaagtata

SEQ ID NO: 162 - DNA, 22 bp, Artificial Sequence
  Synthetic
ctagctcctggactgaccacta

SEQ ID NO: 163 - DNA, 22 bp, Artificial Sequence
  Synthetic
gcaaagcagcctgacctagctc

SEQ ID NO: 164 - DNA, 22 bp, Artificial Sequence
  Synthetic
aaaccgtttacttcaagagctg

SEQ ID NO: 165 - DNA, 22 bp, Artificial Sequence
  Synthetic
taaaccgtttacttcaagagct

SEQ ID NO: 166 - DNA, 22 bp, Artificial Sequence
  Synthetic
agatctgagctctgagtggaag

SEQ ID NO: 167 - DNA, 22 bp, Artificial Sequence
  Synthetic
agaagatctgagctctgagtgg

SEQ ID NO: 168 - DNA, 22 bp, Artificial Sequence
  Synthetic
agttagaagatctgagctctga

SEQ ID NO: 169 - DNA, 22 bp, Artificial Sequence
  Synthetic
atgtgtatgcttttctgttaaa

SEQ ID NO: 170 - DNA, 22 bp, Artificial Sequence
  Synthetic
tgatcatctcgttgatatcctc

SEQ ID NO: 171 - DNA, 22 bp, Artificial Sequence
  Synthetic
ttgatcaagcagagaaagccag

SEQ ID NO: 172 - DNA, 22 bp, Artificial Sequence
  Synthetic
agtcggtaagttctgtccaagc

SEQ ID NO: 173 - DNA, 22 bp, Artificial Sequence
  Synthetic
gcccggttgaaatctgccagag

SEQ ID NO: 174 - DNA, 22 bp, Artificial Sequence
  Synthetic
cagagcaggtacctccaacatc

SEQ ID NO: 175 - DNA, 22 bp, Artificial Sequence
  Synthetic
ggtacctccaacatcaaggaag

SEQ ID NO: 176 - DNA, 22 bp, Artificial Sequence
  Synthetic
caaggaagatggcatttctagt

SEQ ID NO: 177 - DNA, 22 bp, Artificial Sequence
  Synthetic
agatggcatttctagtttggag

SEQ ID NO: 178 - DNA, 22 bp, Artificial Sequence
  Synthetic
atggcagtttccttagtaacca

SEQ ID NO: 179 - DNA, 22 bp, Artificial Sequence
  Synthetic
gtcaccagagtaacagtctgag

SEQ ID NO: 180 - DNA, 22 bp, Artificial Sequence
  Synthetic
tctgagtaggagctaaaatatt

SEQ ID NO: 181 - DNA, 22 bp, Artificial Sequence
  Synthetic
ctgagtaggagctaaaatattt

SEQ ID NO: 182 - DNA, 22 bp, Artificial Sequence
  Synthetic
aaatattttgggtttttgcaaa

SEQ ID NO: 183 - DNA, 22 bp, Artificial Sequence
  Synthetic
gtatgagaaaaaatgataaaag

SEQ ID NO: 184 - DNA, 22 bp, Artificial Sequence
  Synthetic
caacgagatgatcatcaagcag

SEQ ID NO: 185 - DNA, 22 bp, Artificial Sequence
  Synthetic
gagggtgatggtgggtgacctt

SEQ ID NO: 186 - DNA, 22 bp, Artificial Sequence
  Synthetic
ataaaatcacagagggtgatgg

SEQ ID NO: 187 - DNA, 22 bp, Artificial Sequence
  Synthetic
tataaaatcacagagggtgatg

SEQ ID NO: 188 - DNA, 22 bp, Artificial Sequence
  Synthetic
agttataaaatcacagagggtg

SEQ ID NO: 189 - DNA, 22 bp, Artificial Sequence
  Synthetic
tgatcaagttataaaatcacag

SEQ ID NO: 190 - DNA, 22 bp, Artificial Sequence
  Synthetic
ttgatcaagttataaaatcaca

SEQ ID NO: 191 - DNA, 22 bp, Artificial Sequence
  Synthetic
gggcttggacagaacttaccga

SEQ ID NO: 192 - DNA, 22 bp, Artificial Sequence
  Synthetic
ctctggcagatttcaaccgggc

SEQ ID NO: 193 - DNA, 22 bp, Artificial Sequence
  Synthetic
acctgctctggcagatttcaac

SEQ ID NO: 194 - DNA, 22 bp, Artificial Sequence
  Synthetic
tacctgctctggcagatttcaa

SEQ ID NO: 195 - DNA, 22 bp, Artificial Sequence
  Synthetic
cttgatgttggaggtacctgct

SEQ ID NO: 196 - DNA, 22 bp, Artificial Sequence
  Synthetic
aatgccatcttccttgatgttg

SEQ ID NO: 197 - DNA, 22 bp, Artificial Sequence
  Synthetic
agaaatgccatcttccttgatg

SEQ ID NO: 198 - DNA, 22 bp, Artificial Sequence
  Synthetic
ggtgacacaacctgtggttact

SEQ ID NO: 199 - DNA, 22 bp, Artificial Sequence
  Synthetic
tgttactctggtgacacaacct

SEQ ID NO: 200 - DNA, 22 bp, Artificial Sequence
  Synthetic
agctcctactcagactgttact

SEQ ID NO: 201 - DNA, 22 bp, Artificial Sequence
  Synthetic
aaaggtatctttgatactaacc

SEQ ID NO: 202 - DNA, 22 bp, Artificial Sequence
  Synthetic
ccttggtttctgtgattttctt

SEQ ID NO: 203 - DNA, 22 bp, Artificial Sequence
  Synthetic
cttttggattgcatctactgta

SEQ ID NO: 204 - DNA, 22 bp, Artificial Sequence
  Synthetic
ttttggattgcatctactgtat

SEQ ID NO: 205 - DNA, 22 bp, Artificial Sequence
  Synthetic
accctccttccatgactcaagc

SEQ ID NO: 206 - DNA, 22 bp, Artificial Sequence
  Synthetic
cttccatgactcaagcttggct

SEQ ID NO: 207 - DNA, 22 bp, Artificial Sequence
  Synthetic
acatttcattcaactgttgcct

SEQ ID NO: 208 - DNA, 22 bp, Artificial Sequence
  Synthetic
tcaactgttgcctccggttctg

SEQ ID NO: 209 - DNA, 22 bp, Artificial Sequence
  Synthetic
tgaattctttcaactagaataa

SEQ ID NO: 210 - DNA, 22 bp, Artificial Sequence
  Synthetic
ccaaaagaaaatcacagaaacc

SEQ ID NO: 211 - DNA, 22 bp, Artificial Sequence
  Synthetic
gccaagcttgagtcatggaagg

SEQ ID NO: 212 - DNA, 22 bp, Artificial Sequence
  Synthetic
agccaagcttgagtcatggaag

SEQ ID NO: 213 - DNA, 22 bp, Artificial Sequence
  Synthetic
cagagccaagcttgagtcatgg

SEQ ID NO: 214 - DNA, 22 bp, Artificial Sequence
  Synthetic
aggccagagccaagcttgagtc

SEQ ID NO: 215 - DNA, 22 bp, Artificial Sequence
  Synthetic
agaagctgagcaggtcttagga

SEQ ID NO: 216 - DNA, 22 bp, Artificial Sequence
  Synthetic
aaggaagaagctgagcaggtct

SEQ ID NO: 217 - DNA, 22 bp, Artificial Sequence
  Synthetic
ggaagctaaggaagaagctgag

SEQ ID NO: 218 - DNA, 22 bp, Artificial Sequence
  Synthetic
ttcaacacaatggctggaagct

SEQ ID NO: 219 - DNA, 22 bp, Artificial Sequence
  Synthetic
gttaaaggattcaacacaatgg

SEQ ID NO: 220 - DNA, 22 bp, Artificial Sequence
  Synthetic
aaatgttaaaggattcaacaca

SEQ ID NO: 221 - DNA, 22 bp, Artificial Sequence
  Synthetic
gcaacagttgaatgaaatgtta

SEQ ID NO: 222 - DNA, 22 bp, Artificial Sequence
  Synthetic
tacaagaacaccttcagaaccg

SEQ ID NO: 223 - DNA, 22 bp, Artificial Sequence
  Synthetic
aagtacaagaacaccttcagaa

SEQ ID NO: 224 - DNA, 22 bp, Artificial Sequence
  Synthetic
agttgaaagaattcagaatcag

SEQ ID NO: 225 - DNA, 22 bp, Artificial Sequence
  Synthetic
tagttgaaagaattcagaatca

SEQ ID NO: 226-299 - skipped (74 entries)

SEQ ID NO: 300 - DNA, 22 bp, Artificial Sequence
  Synthetic
cttgacgctgcccaatgccatc

SEQ ID NO: 301 - DNA, 22 bp, Artificial Sequence
  Synthetic
ctggcagaaaggagaaagaggt

SEQ ID NO: 302 - DNA, 22 bp, Artificial Sequence
  Synthetic
gctggcagaaaggagaaagagg

SEQ ID NO: 303 - DNA, 22 bp, Artificial Sequence
  Synthetic
aagagctggcagaaaggagaaa

SEQ ID NO: 304 - DNA, 22 bp, Artificial Sequence
  Synthetic
aattaggaagcttgagtctgcg

SEQ ID NO: 305 - DNA, 22 bp, Artificial Sequence
  Synthetic
tgtcagaacactgaatgcaact

SEQ ID NO: 306 - DNA, 22 bp, Artificial Sequence
  Synthetic
tacaggaactccaggatggcat

SEQ ID NO: 307 - DNA, 22 bp, Artificial Sequence
  Synthetic
ttacaggaactccaggatggca

SEQ ID NO: 308 - DNA, 22 bp, Artificial Sequence
  Synthetic
gatggcttacaggaactccagg

SEQ ID NO: 309 - DNA, 22 bp, Artificial Sequence
  Synthetic
ttctgatggcttacaggaactc

SEQ ID NO: 310 - skipped

SEQ ID NO: 311 - DNA, 22 bp, Artificial Sequence
  Synthetic
caatgaaatgatcatcaaacag

SEQ ID NO: 312 - DNA, 22 bp, Artificial Sequence
  Synthetic
aaagatatgcttgacactaacc

SEQ ID NO: 313 - DNA, 22 bp, Artificial Sequence
  Synthetic
ccaaaagaagatcacagaaacc

SEQ ID NO: 314 - DNA, 22 bp, Artificial Sequence
  Synthetic
aggttcaagaacagctgcagaa

SEQ ID NO: 315 - DNA, 22 bp, Artificial Sequence
  Synthetic
agttgaaagaattcagattcag

SEQ ID NO: 316 - DNA, 22 bp, Artificial Sequence
  Synthetic
cagttgaaagaattcagattca

SEQ ID NO: 317 - DNA, 22 bp, Artificial Sequence
  Synthetic
ttgacgctgcccaatgccatcc

SEQ ID NO: 318 - DNA, 22 bp, Artificial Sequence
  Synthetic
gcgtcaagctgttgtcagaaca

SEQ ID NO: 319 - DNA, 22 bp, Artificial Sequence
  Synthetic
ttctgatggcttacaggaactc

SEQ ID NO: 320 - skipped

SEQ ID NO: 321 - DNA, 22 bp, Artificial Sequence
  Synthetic
cttgaacctcatcccactgaat

SEQ ID NO: 322 - DNA, 22 bp, Artificial Sequence
  Synthetic
actgaatctgaattctttcaac

SEQ ID NO: 323 - DNA, 22 bp, Artificial Sequence
  Synthetic
gctgcagaacaggagacaacag

SEQ ID NO: 324 - DNA, 22 bp, Artificial Sequence
  Synthetic
agttgaaagaattcagattcag

SEQ ID NO: 325 - DNA, 22 bp, Artificial Sequence
  Synthetic
ttcttatttttattccagttga

SEQ ID NO: 326-399 - skipped (74 entries)

SEQ ID NO: 400 - DNA, 20 bp, Artificial Sequence
  Synthetic
atcttacaggaactccagga

SEQ ID NO: 401 - DNA, 20 bp, Artificial Sequence
  Synthetic
caccagagtaacagtctgag

SEQ ID NO: 402 - DNA, 20 bp, Artificial Sequence
  Synthetic
ttgaaagaattcagaatcag

SEQ ID NO: 403 - DNA, 20 bp, Artificial Sequence
  Synthetic
ggcttacaggaactccagga

SEQ ID NO: 404 - DNA, 20 bp, Artificial Sequence
  Synthetic
cactagagtaacagtctgac

SEQ ID NO: 405 - DNA, 20 bp, Artificial Sequence
  Synthetic
ttgaaagaattcagattcag

SEQ ID NO: 406-499 - skipped (94 entries)

SEQ ID NO: 500 - DNA, 86 bp, Artificial Sequence
  Synthetic
gtttaagtactctgtgctggaaacagcacagaatctacttaaacaaggcaaaatgccgtgtttatctcgtcaacttgttggcgaga

SEQ ID NO: 501 - DNA, 77 bp, Artificial Sequence
  Synthetic
gttttagtactctggaaacagaatctactaaaacaaggcaaaatgccgtgtttatctcgtcaacttgttggcgagat

SEQ ID NO: 502 - DNA, 87 bp, Artificial Sequence
  Synthetic
gtttaagtactctgtgctggaaacagcacagaatctacttaaacaaggcaaaatgccgtgtttatctcgtcaacttgttggcgagat

SEQ ID NO: 503 - DNA, 77 bp, Artificial Sequence
  Synthetic
gtttaagtactctggaaacagaatctacttaaacaaggcaaaatgccgtgtttatctcgtcaacttgttggcgagat

SEQ ID NO: 504-551 - skipped (48 entries)

SEQ ID NO: 552 - DNA, 460 bp, Artificial Sequence
  Synthetic
taattaacagatttgttaatgaagaggaaatatacaaatattaatgaacaaaatagtgtgtttagaacaagactcacatacaggagacatacacatgttaaaggaggcattttgaatttgtggggaaaacttacaaattcagtatagggtttggagcactttgatagctaagaggtggggtagggggcagagtgaaggctgtctctcttttactccttctaaaaatattccagtggatcaaagatgtaggaaacgatggatccatgtaggcctcagccttcaagtttctcctctgagatttcagggattatcctttaaaggagtcaggaagagggtagagatcacaaagataataagctcagacagtttgtatgttaaataaacctcaggaggttttagtcttaaggtccttaatctgaccttccaaactgacttttccagaaacttccaaaagcctctc

SEQ ID NO: 553 - DNA, 22 bp, Artificial Sequence
  Synthetic
ttgtcagaacactgaatgcaac

SEQ ID NO: 554 - DNA, 22 bp, Artificial Sequence
  Synthetic
acagatgtcaatattctacaag

SEQ ID NO: 555 - DNA, 20 bp, Artificial Sequence
  Synthetic
ttccccagttgcattcaatg

SEQ ID NO: 556 - DNA, 20 bp, Artificial Sequence
  Synthetic
ggcagcggcaaactgttgtc

SEQ ID NO: 557 - DNA, 20 bp, Artificial Sequence
  Synthetic
cccagttgcattcaatgttc

SEQ ID NO: 558 - DNA, 20 bp, Artificial Sequence
  Synthetic
aatgttctgacaacagtttg

SEQ ID NO: 559 - DNA, 20 bp, Artificial Sequence
  Synthetic
tggtatcttacaggaactcc

SEQ ID NO: 560 - DNA, 20 bp, Artificial Sequence
  Synthetic
caggaactccaggatggcat

SEQ ID NO: 561 - DNA, 20 bp, Artificial Sequence
  Synthetic
ttgaggattgctgaattatt

SEQ ID NO: 562 - DNA, 20 bp, Artificial Sequence
  Synthetic
cctgtagaatactggcatct

SEQ ID NO: 563 - DNA, 20 bp, Artificial Sequence
  Synthetic
ctgtagaatactggcatctg

SEQ ID NO: 564 - DNA, 20 bp, Artificial Sequence
  Synthetic
cttccccagttgcattcaat

SEQ ID NO: 565 - DNA, 20 bp, Artificial Sequence
  Synthetic
ttcctgtagaatactggcat

SEQ ID NO: 566 - DNA, 20 bp, Artificial Sequence
  Synthetic
tcctgtagaatactggcatc

SEQ ID NO: 567 - DNA, 20 bp, Artificial Sequence
  Synthetic
gaggattgctgaattatttc

SEQ ID NO: 568 - DNA, 20 bp, Artificial Sequence
  Synthetic
tcagaacattgaatgcaact

SEQ ID NO: 569 - DNA, 20 bp, Artificial Sequence
  Synthetic
cattcaatgttctgacaaca

SEQ ID NO: 570 - DNA, 20 bp, Artificial Sequence
  Synthetic
ccgctgcccaatgccatcct

SEQ ID NO: 571 - DNA, 20 bp, Artificial Sequence
  Synthetic
agcaatcctcaaaaacagat

SEQ ID NO: 572 - DNA, 20 bp, Artificial Sequence
  Synthetic
tgacaacagtttgccgctgc

SEQ ID NO: 573 - DNA, 20 bp, Artificial Sequence
  Synthetic
gcagacctcctgccaccgca

SEQ ID NO: 574 - DNA, 20 bp, Artificial Sequence
  Synthetic
cagacctcctgccaccgcag

SEQ ID NO: 575 - DNA, 20 bp, Artificial Sequence
  Synthetic
tacaggaaaaattgggaagc

SEQ ID NO: 576 - DNA, 20 bp, Artificial Sequence
  Synthetic
ggaagcctgaatctgcggtg

SEQ ID NO: 577 - DNA, 20 bp, Artificial Sequence
  Synthetic
ttctgtctgacagctgtttg

SEQ ID NO: 578-600 - skipped (23 entries)

SEQ ID NO: 601 - DNA, 86 bp, Artificial Sequence
  Synthetic
gtttaagtactctgtgctggaaacagcacagaatctactgaaacaagacaatatgtcgtgtttatcccatcaatttattggtggga

SEQ ID NO: 602-699 - skipped (98 entries)

SEQ ID NO: 700 - DNA, 450 bp, Artificial Sequence
  Synthetic
ctagactagcatgctgcccatgtaaggaggcaaggcctggggacacccgagatgcctggttataattaacccagacatgtggctgcccccccccccccaacacctgctgcctctaaaaataaccctgcatgccatgttcccggcgaagggccagctgtcccccgccagctagactcagcacttagtttaggaaccagtgagcaagtcagcccttggggcagcccatacaaggccatggggctgggcaagctgcacgcctgggtccggggtgggcacggtgcccgggcaacgagctgaaagctcatctgctctcaggggcccctccctggggacagcccctcctggctagtcacaccctgtaggctcctctatataacccaggggcacaggggctgccctcattctaccaccacctccacagcacagacagacactcaggagccagccagc

SEQ ID NO: 701 - DNA, 436 bp, Artificial Sequence
  Synthetic
tgcccatgtaaggaggcaaggcctggggacacccgagatgcctggttataattaacccagacatgtggctgcccccccccccccaacacctgctgcctctaaaaataaccctgcatgccatgttcccggcgaagggccagctgtcccccgccagctagactcagcacttagtttaggaaccagtgagcaagtcagcccttggggcagcccatacaaggccatggggctgggcaagctgcacgcctgggtccggggtgggcacggtgcccgggcaacgagctgaaagctcatctgctctcaggggcccctccctggggacagcccctcctggctagtcacaccctgtaggctcctctatataacccaggggcacaggggctgccctcattctaccaccacctccacagcacagacagacactcaggagccagccagc

SEQ ID NO: 702 - DNA, 472 bp, Artificial Sequence
  Synthetic
cgagtccaacacccgtgggaatcccatgggcaccatggcccctcgctccaaaaatgctttcgcgtcgcgcagacactgctcggtagtttcggggatcagcgtttgagtaagagcccgcgtctgaaccctccgcgccgccccggccccagtggaaagacgcgcaggcaaaacgcaccacgtgacggagcgtgaccgcgcgccgagcgcgcgccaaggtcgggcaggaagagggcctatttcccatgattccttcatatttgcatatacgatacaaggctgttagagagataattagaattaatttgactgtaaacacaaagatattagtacaaaatacgtgacgtagaaagtaataatttcttgggtagtttgcagttttaaaattatgttttaaaatggactatcatatgcttaccgtaacttgaaagtatttcgatttcttggctttatatatcttgtggaaaggacgaaa

SEQ ID NO: 703 - DNA, 108 bp, Artificial Sequence
  Synthetic
gctcggcgcgcccatatttgcatgtcgctatgtgttctgggaaatcaccataaacgtgaaatgtctttggatttgggaatcttataagttctgtatgagaccacggta

SEQ ID NO: 704 - DNA, 251 bp, Artificial Sequence
  Synthetic
tgacggcgcgccctgcagtatttagcatgccccacccatctgcaaggcattctggatagtgtcaaaacagccggaaatcaagtccgtttatctcaaactttagcattttgggaataaatgatatttgctatgctggttaaattagattttagttaaatttcctgctgaagctctagtacgataagtaacttgacctaagtgtaaagttgagatttccttcaggtttatatagcttgtgcgccgcctgggta

SEQ ID NO: 705 - DNA, 249 bp, Artificial Sequence
  Synthetic
gagggcctatttcccatgattccttcatatttgcatatacgatacaaggctgttagagagataattggaattaatttgactgtaaacacaaagatattagtacaaaatacgtgacgtagaaagtaataatttcttgggtagtttgcagttttaaaattatgttttaaaatggactatcatatgcttaccgtaacttgaaagtatttcgatttcttggctttatatatcttgtggaaaggacgaaacacc

SEQ ID NO: 706 - DNA, 243 bp, Artificial Sequence
  Synthetic
ctgcagtatttagcatgccccacccatctgcaaggcattctggatagtgtcaaaacagccggaaatcaagtccgtttatctcaaactttagcattttgggaataaatgatatttgctatgctggttaaattagattttagttaaatttcctgctgaagctctagtacgataagcaacttgacctaagtgtaaagttgagacttccttcaggtttatatagcttgtgcgccgcttgggtacctc

SEQ ID NO: 707 - DNA, 100 bp, Artificial Sequence
  Synthetic
aatatttgcatgtcgctatgtgttctgggaaatcaccataaacgtgaaatgtctttggatttgggaatcttataagttctgtatgagaccactctttccc

SEQ ID NO: 708 - DNA, 100 bp, Artificial Sequence
  Synthetic
atatttagcatgtcgctatgtgttctgggaaacttgacctaagtgtaaagttgagatttccttcaggtttatatagttctgtatgagaccactctttccc

SEQ ID NO: 709 - DNA, 143 bp, Artificial Sequence
  Synthetic
ggccactccctctctgcgcgctcgctcgctcactgaggccgggcgaccaaaggtcgcccgacgcccgggctttgcccgggcggcctcagtgagcgagcgagcgcgcagagagggagtggccaactccatcactaggggttcct

SEQ ID NO: 710 - DNA, 137 bp, Artificial Sequence
  Synthetic
aggaacccctagtgatggagttggccactccctctctgcgcgctcgctcgctcactgaggccgggcgaccaaaggtcgcccgacgcccgggctttgcccgggcggcctcagtgagcgagcgagcgcgcagagaggga

SEQ ID NO: 711 - protein, 1052 aa, Artificial Sequence
  Synthetic
KRNYILGLDIGITSVGYGIIDYETRDVIDAGVRLFKEANVENNEGRRSKRGARRLKRRRRHRIQRVKKLLFDYNLLTDHSELSGINPYEARVKGLSQKLSEEEFSAALLHLAKRRGVHNVNEVEEDTGNELSTKEQISRNSKALEEKYVAELQLERLKKDGEVRGSINRFKTSDYVKEAKQLLKVQKAYHQLDQSFIDTYIDLLETRRTYYEGPGEGSPFGWKDIKEWYEMLMGHCTYFPEELRSVKYAYNADLYNALNDLNNLVITRDENEKLEYYEKFQIIENVFKQKKKPTLKQIAKEILVNEEDIKGYRVTSTGKPEFTNLKVYHDIKDITARKEIIENAELLDQIAKILTIYQSSEDIQEELTNLNSELTQEEIEQISNLKGYTGTHNLSLKAINLILDELWHTNDNQIAIFNRLKLVPKKVDLSQQKEIPTTLVDDFILSPVVKRSFIQSIKVINAIIKKYGLPNDIIIELAREKNSKDAQKMINEMQKRNRQTNERIEEIIRTTGKENAKYLIEKIKLHDMQEGKCLYSLEAIPLEDLLNNPFNYEVDHIIPRSVSFDNSFNNKVLVKQEENSKKGNRTPFQYLSSSDSKISYETFKKHILNLAKGKGRISKTKKEYLLEERDINRFSVQKDFINRNLVDTRYATRGLMNLLRSYFRVNNLDVKVKSINGGFTSFLRRKWKFKKERNKGYKHHAEDALIIANADFIFKEWKKLDKAKKVMENQMFEEKQAESMPEIETEQEYKEIFITPHQIKHIKDFKDYKYSHRVDKKPNRELINDTLYSTRKDDKGNTLIVNNLNGLYDKDNDKLKKLINKSPEKLLMYHHDPQTYQKLKLIMEQYGDEKNPLYKYYEETGNYLTKYSKKDNGPVIKKIKYYGNKLNAHLDITDDYPNSRNKVVKLSLKPYRFDVYLDNGVYKFVTVKNLDVIKKENYYEVNSKCYEEAKKLKKISNQAEFIASFYNNDLIKINGELYRVIGVNNDLLNRIEVNMIDITYREYLENMNDKRPPRIIKTIASKTQSIKKYSTDILGNLYEVKSKKHPQIIKKG

SEQ ID NO: 712 - protein, 1053 aa, Artificial Sequence
  Synthetic
NQKFILGLDIGITSVGYGLIDYETKNIIDAGVRLFPEANVENNEGRRSKRGSRRLKRRRIHRLERVKKLLEDYNLLDQSQIPQSTNPYAIRVKGLSEALSKDELVIALLHIAKRRGIHKIDVIDSNDDVGNELSTKEQLNKNSKLLKDKFVCQIQLERMNEGQVRGEKNRFKTADIIKEIIQLLNVQKNFHQLDENFINKYIELVEMRREYFEGPGKGSPYGWEGDPKAWYETLMGHCTYFPDELRSVKYAYSADLFNALNDLNNLVIQRDGLSKLEYHEKYHIIENVFKQKKKPTLKQIANEINVNPEDIKGYRITKSGKPQFTEFKLYHDLKSVLFDQSILENEDVLDQIAEILTIYQDKDSIKSKLTELDILLNEEDKENIAQLTGYTGTHRLSLKCIRLVLEEQWYSSRNQMEIFTHLNIKPKKINLTAANKIPKAMIDEFILSPVVKRTFGQAINLINKIIEKYGVPEDIIIELARENNSKDKQKFINEMQKKNENTRKRINEIIGKYGNQNAKRLVEKIRLHDEQEGKCLYSLESIPLEDLLNNPNHYEVDHIIPRSVSFDNSYHNKVLVKQSENSKKSNLTPYQYFNSGKSKLSYNQFKQHILNLSKSQDRISKKKKEYLLEERDINKFEVQKEFINRNLVDTRYATRELTNYLKAYFSANNMNVKVKTINGSFTDYLRKVWKFKKERNHGYKHHAEDALIIANADFLFKENKKLKAVNSVLEKPEIETKQLDIQVDSEDNYSEMFIIPKQVQDIKDFRNFKYSHRVDKKPNRQLINDTLYSTRKKDNSTYIVQTIKDIYAKDNTTLKKQFDKSPEKFLMYQHDPRTFEKLEVIMKQYANEKNPLAKYHEETGEYLTKYSKKNNGPIVKSLKYIGNKLGSHLDVTHQFKSSTKKLVKLSIKPYRFDVYLTDKGYKFITISYLDVLKKDNYYYIPEQKYDKLKLGKAIDKNAKFIASFYKNDLIKLDGEIYKIIGVNSDTRNMIELDLPDIRYKEYCELNNIKGEPRIKKTIGKKVNSIEKLTTDVLGNVFTNTQYTKPQLLFKRGN

SEQ ID NO: 713 - protein, 7 aa, Artificial Sequence
  Synthetic
PKKKRKV

SEQ ID NO: 714 - protein, 16 aa, Artificial Sequence
  Synthetic
KRPAATKKAGQAKKKK

SEQ ID NO: 715 - protein, 1052 aa, Artificial Sequence
  Synthetic
KRNYILGLDIGITSVGYGIIDYETRDVIDAGVRLFKEANVENNEGRRSKRGARRLKRRRRHRIQRVKKLLFDYNLLTDHSELSGINPYEARVKGLSQKLSEEEFSAALLHLAKRRGVHNVNEVEEDTGNELSTKEQISRNSKALEEKYVAELQLERLKKDGEVRGSINRFKTSDYVKEAKQLLKVQKAYHQLDQSFIDTYIDLLETRRTYYEGPGEGSPFGWKDIKEWYEMLMGHCTYFPEELRSVKYAYNADLYNALNDLNNLVITRDENEKLEYYEKFQIIENVFKQKKKPTLKQIAKEILVNEEDIKGYRVTSTGKPEFTNLKVYHDIKDITARKEIIENAELLDQIAKILTIYQSSEDIQEELTNLNSELTQEEIEQISNLKGYTGTHNLSLKAINLILDELWHTNDNQIAIFNRLKLVPKKVDLSQQKEIPTTLVDDFILSPVVKRSFIQSIKVINAIIKKYGLPNDIIIELAREKNSKDAQKMINEMQKRNRQTNERIEEIIRTTGKENAKYLIEKIKLHDMQEGKCLYSLEAIPLEDLLNNPFNYEVDHIIPRSVSFDNSFNNKVLVKQEENSKKGNRTPFQYLSSSDSKISYETFKKHILNLAKGKGRISKTKKEYLLEERDINRFSVQKDFINRNLVDTRYATRGLMNLLRSYFRVNNLDVKVKSINGGFTSFLRRKWKFKKERNKGYKHHAEDALIIANADFIFKEWKKLDKAKKVMENQMFEEKQAESMPEIETEQEYKEIFITPHQIKHIKDFKDYKYSHRVDKKPNRKLINDTLYSTRKDDKGNTLIVNNLNGLYDKDNDKLKKLINKSPEKLLMYHHDPQTYQKLKLIMEQYGDEKNPLYKYYEETGNYLTKYSKKDNGPVIKKIKYYGNKLNAHLDITDDYPNSRNKVVKLSLKPYRFDVYLDNGVYKFVTVKNLDVIKKENYYEVNSKCYEEAKKLKKISNQAEFIASFYKNDLIKINGELYRVIGVNNDLLNRIEVNMIDITYREYLENMNDKRPPHIIKTIASKTQSIKKYSTDILGNLYEVKSKKHPQIIKKG

SEQ ID NO: 716 - protein, 1052 aa, Artificial Sequence
  Synthetic
KRNYILGLDIGITSVGYGIIDYETRDVIDAGVRLFKEANVENNEGRRSKRGARRLKRRRRHRIQRVKKLLFDYNLLTDHSELSGINPYEARVKGLSQKLSEEEFSAALLHLAKRRGVHNVNEVEEDTGNELSTKEQISRNSKALEEKYVAELQLERLKKDGEVRGSINRFKTSDYVKEAKQLLKVQKAYHQLDQSFIDTYIDLLETRRTYYEGPGEGSPFGWKDIKEWYEMLMGHCTYFPEELASVKYAYNADLYNALNDLNNLVITRDENEKLEYYEKFQIIENVFKQKKKPTLKQIAKEILVNEEDIKGYRVTSTGKPEFTNLKVYHDIKDITARKEIIENAELLDQIAKILTIYQSSEDIQEELTNLNSELTQEEIEQISNLKGYTGTHNLSLKAINLILDELWHTNDAQIAIFARLKLVPKKVDLSQQKEIPTTLVDDFILSPVVKRSFIQSIKVINAIIKKYGLPNDIIIELAREKNSKDAQKMINEMQKRNRQTNERIEEIIRTTGKENAKYLIEKIKLHDMQEGKCLYSLEAIPLEDLLNNPFNYEVDHIIPRSVSFDNSFNNKVLVKQEENSKKGNRTPFQYLSSSDSKISYETFKKHILNLAKGKGRISKTKKEYLLEERDINRFSVQKDFINRNLVDTRYATAGLMNLLRSYFRVNNLDVKVKSINGGFTSFLRRKWKFKKERNKGYKHHAEDALIIANADFIFKEWKKLDKAKKVMENQMFEEKQAESMPEIETEQEYKEIFITPHQIKHIKDFKDYKYSHRVDKKPNRELINDTLYSTRKDDKGNTLIVNNLNGLYDKDNDKLKKLINKSPEKLLMYHHDPQTYQKLKLIMEQYGDEKNPLYKYYEETGNYLTKYSKKDNGPVIKKIKYYGNKLNAHLDITDDYPNSRNKVVKLSLKPYRFDVYLDNGVYKFVTVKNLDVIKKENYYEVNSKCYEEAKKLKKISNQAEFIASFYNNDLIKINGELYRVIGVNNDLLNRIEVNMIDITYREYLENMNDKRPPRIIKTIASKTQSIKKYSTDILGNLYEVKSKKHPQIIKKG

SEQ ID NO: 717 - protein, 1052 aa, Artificial Sequence
  Synthetic
KRNYILGLDIGITSVGYGIIDYETRDVIDAGVRLFKEANVENNEGRRSKRGARRLKRRRRHRIQRVKKLLFDYNLLTDHSELSGINPYEARVKGLSQKLSEEEFSAALLHLAKRRGVHNVNEVEEDTGNELSTKEQISRNSKALEEKYVAELQLERLKKDGEVRGSINRFKTSDYVKEAKQLLKVQKAYHQLDQSFIDTYIDLLETRRTYYEGPGEGSPFGWKDIKEWYEMLMGHCTYFPEELASVKYAYNADLYNALNDLNNLVITRDENEKLEYYEKFQIIENVFKQKKKPTLKQIAKEILVNEEDIKGYRVTSTGKPEFTNLKVYHDIKDITARKEIIENAELLDQIAKILTIYQSSEDIQEELTNLNSELTQEEIEQISNLKGYTGTHNLSLKAINLILDELWHTNDAQIAIFARLKLVPKKVDLSQQKEIPTTLVDDFILSPVVKRSFIQSIKVINAIIKKYGLPNDIIIELAREKNSKDAQKMINEMQKRNRQTNERIEEIIRTTGKENAKYLIEKIKLHDMQEGKCLYSLEAIPLEDLLNNPFNYEVDHIIPRSVSFDNSFNNKVLVKQEENSKKGNRTPFQYLSSSDSKISYETFKKHILNLAKGKGRISKTKKEYLLEERDINRFSVQKDFINRNLVDTRYATAGLMNLLRSYFRVNNLDVKVKSINGGFTSFLRRKWKFKKERNKGYKHHAEDALIIANADFIFKEWKKLDKAKKVMENQMFEEKQAESMPEIETEQEYKEIFITPHQIKHIKDFKDYKYSHRVDKKPNRKLINDTLYSTRKDDKGNTLIVNNLNGLYDKDNDKLKKLINKSPEKLLMYHHDPQTYQKLKLIMEQYGDEKNPLYKYYEETGNYLTKYSKKDNGPVIKKIKYYGNKLNAHLDITDDYPNSRNKVVKLSLKPYRFDVYLDNGVYKFVTVKNLDVIKKENYYEVNSKCYEEAKKLKKISNQAEFIASFYKNDLIKINGELYRVIGVNNDLLNRIEVNMIDITYREYLENMNDKRPPHIIKTIASKTQSIKKYSTDILGNLYEVKSKKHPQIIKKG

SEQ ID NO: 718 - protein, 1053 aa, Artificial Sequence
  Synthetic
NQKFILGLDIGITSVGYGLIDYETKNIIDAGVRLFPEANVENNEGRRSKRGSRRLKRRRIHRLERVKKLLEDYNLLDQSQIPQSTNPYAIRVKGLSEALSKDELVIALLHIAKRRGIHKIDVIDSNDDVGNELSTKEQLNKNSKLLKDKFVCQIQLERMNEGQVRGEKNRFKTADIIKEIIQLLNVQKNFHQLDENFINKYIELVEMRREYFEGPGKGSPYGWEGDPKAWYETLMGHCTYFPDELRSVKYAYSADLFNALNDLNNLVIQRDGLSKLEYHEKYHIIENVFKQKKKPTLKQIANEINVNPEDIKGYRITKSGKPQFTEFKLYHDLKSVLFDQSILENEDVLDQIAEILTIYQDKDSIKSKLTELDILLNEEDKENIAQLTGYTGTHRLSLKCIRLVLEEQWYSSRNQMEIFTHLNIKPKKINLTAANKIPKAMIDEFILSPVVKRTFGQAINLINKIIEKYGVPEDIIIELARENNSKDKQKFINEMQKKNENTRKRINEIIGKYGNQNAKRLVEKIRLHDEQEGKCLYSLESIPLEDLLNNPNHYEVDHIIPRSVSFDNSYHNKVLVKQSENSKKSNLTPYQYFNSGKSKLSYNQFKQHILNLSKSQDRISKKKKEYLLEERDINKFEVQKEFINRNLVDTRYATRELTNYLKAYFSANNMNVKVKTINGSFTDYLRKVWKFKKERNHGYKHHAEDALIIANADFLFKENKKLKAVNSVLEKPEIETKQLDIQVDSEDNYSEMFIIPKQVQDIKDFRNFKYSHRVDKKPNRKLINDTLYSTRKKDNSTYIVQTIKDIYAKDNTTLKKQFDKSPEKFLMYQHDPRTFEKLEVIMKQYANEKNPLAKYHEETGEYLTKYSKKNNGPIVKSLKYIGNKLGSHLDVTHQFKSSTKKLVKLSIKPYRFDVYLTDKGYKFITISYLDVLKKDNYYYIPEQKYDKLKLGKAIDKNAKFIASFYKNDLIKLDGEIYKIIGVNSDTRNMIELDLPDIRYKEYCELNNIKGEPHIKKTIGKKVNSIEKLTTDVLGNVFTNTQYTKPQLLFKRGN

SEQ ID NO: 719 - protein, 1053 aa, Artificial Sequence
  Synthetic
NQKFILGLDIGITSVGYGLIDYETKNIIDAGVRLFPEANVENNEGRRSKRGSRRLKRRRIHRLERVKKLLEDYNLLDQSQIPQSTNPYAIRVKGLSEALSKDELVIALLHIAKRRGIHKIDVIDSNDDVGNELSTKEQLNKNSKLLKDKFVCQIQLERMNEGQVRGEKNRFKTADIIKEIIQLLNVQKNFHQLDENFINKYIELVEMRREYFEGPGKGSPYGWEGDPKAWYETLMGHCTYFPDELASVKYAYSADLFNALNDLNNLVIQRDGLSKLEYHEKYHIIENVFKQKKKPTLKQIANEINVNPEDIKGYRITKSGKPQFTEFKLYHDLKSVLFDQSILENEDVLDQIAEILTIYQDKDSIKSKLTELDILLNEEDKENIAQLTGYTGTHRLSLKCIRLVLEEQWYSSRAQMEIFAHLNIKPKKINLTAANKIPKAMIDEFILSPVVKRTFGQAINLINKIIEKYGVPEDIIIELARENNSKDKQKFINEMQKKNENTRKRINEIIGKYGNQNAKRLVEKIRLHDEQEGKCLYSLESIPLEDLLNNPNHYEVDHIIPRSVSFDNSYHNKVLVKQSENSKKSNLTPYQYFNSGKSKLSYNQFKQHILNLSKSQDRISKKKKEYLLEERDINKFEVQKEFINRNLVDTRYATAELTNYLKAYFSANNMNVKVKTINGSFTDYLRKVWKFKKERNHGYKHHAEDALIIANADFLFKENKKLKAVNSVLEKPEIETKQLDIQVDSEDNYSEMFIIPKQVQDIKDFRNFKYSHRVDKKPNRQLINDTLYSTRKKDNSTYIVQTIKDIYAKDNTTLKKQFDKSPEKFLMYQHDPRTFEKLEVIMKQYANEKNPLAKYHEETGEYLTKYSKKNNGPIVKSLKYIGNKLGSHLDVTHQFKSSTKKLVKLSIKPYRFDVYLTDKGYKFITISYLDVLKKDNYYYIPEQKYDKLKLGKAIDKNAKFIASFYKNDLIKLDGEIYKIIGVNSDTRNMIELDLPDIRYKEYCELNNIKGEPRIKKTIGKKVNSIEKLTTDVLGNVFTNTQYTKPQLLFKRGN

SEQ ID NO: 720 - protein, 1053 aa, Artificial Sequence
  Synthetic
NQKFILGLDIGITSVGYGLIDYETKNIIDAGVRLFPEANVENNEGRRSKRGSRRLKRRRIHRLERVKKLLEDYNLLDQSQIPQSTNPYAIRVKGLSEALSKDELVIALLHIAKRRGIHKIDVIDSNDDVGNELSTKEQLNKNSKLLKDKFVCQIQLERMNEGQVRGEKNRFKTADIIKEIIQLLNVQKNFHQLDENFINKYIELVEMRREYFEGPGKGSPYGWEGDPKAWYETLMGHCTYFPDELASVKYAYSADLFNALNDLNNLVIQRDGLSKLEYHEKYHIIENVFKQKKKPTLKQIANEINVNPEDIKGYRITKSGKPQFTEFKLYHDLKSVLFDQSILENEDVLDQIAEILTIYQDKDSIKSKLTELDILLNEEDKENIAQLTGYTGTHRLSLKCIRLVLEEQWYSSRAQMEIFAHLNIKPKKINLTAANKIPKAMIDEFILSPVVKRTFGQAINLINKIIEKYGVPEDIIIELARENNSKDKQKFINEMQKKNENTRKRINEIIGKYGNQNAKRLVEKIRLHDEQEGKCLYSLESIPLEDLLNNPNHYEVDHIIPRSVSFDNSYHNKVLVKQSENSKKSNLTPYQYFNSGKSKLSYNQFKQHILNLSKSQDRISKKKKEYLLEERDINKFEVQKEFINRNLVDTRYATAELTNYLKAYFSANNMNVKVKTINGSFTDYLRKVWKFKKERNHGYKHHAEDALIIANADFLFKENKKLKAVNSVLEKPEIETKQLDIQVDSEDNYSEMFIIPKQVQDIKDFRNFKYSHRVDKKPNRKLINDTLYSTRKKDNSTYIVQTIKDIYAKDNTTLKKQFDKSPEKFLMYQHDPRTFEKLEVIMKQYANEKNPLAKYHEETGEYLTKYSKKNNGPIVKSLKYIGNKLGSHLDVTHQFKSSTKKLVKLSIKPYRFDVYLTDKGYKFITISYLDVLKKDNYYYIPEQKYDKLKLGKAIDKNAKFIASFYKNDLIKLDGEIYKIIGVNSDTRNMIELDLPDIRYKEYCELNNIKGEPHIKKTIGKKVNSIEKLTTDVLGNVFTNTQYTKPQLLFKRGN

SEQ ID NO: 721 - DNA, 48 bp, Artificial Sequence
  Synthetic
ccagagtaacagtctgagtaggagctaaaatattttgggtttttgcaa

SEQ ID NO: 722 - DNA, 27 bp, Artificial Sequence
  Synthetic
ccggcagctaagaaaaagaaactggat

SEQ ID NO: 723 - DNA, 54 bp, Artificial Sequence
  Synthetic
atgatggccccaaagaagaagcggaaggtcggtatccacggagtcccagcagcc

SEQ ID NO: 724 - DNA, 57 bp, Artificial Sequence
  Synthetic
tcgtcggcagcgtcagatgtgtataagagacaggtctttctgtcttgtatcctttgg

SEQ ID NO: 725 - DNA, 54 bp, Artificial Sequence
  Synthetic
gtctcgtgggctcggagatgtgtataagagacagaatgttagtgcctttcaccc

SEQ ID NO: 726 - DNA, 24 bp, Artificial Sequence
  Synthetic
gtctttctgtcttgtatcctttgg

SEQ ID NO: 727 - DNA, 20 bp, Artificial Sequence
  Synthetic
atcttacaggaactccagga

SEQ ID NO: 728-799 - skipped (72 entries)

SEQ ID NO: 800 - DNA, 24 bp, Artificial Sequence
  Synthetic
gtctttctgtcttgtatcctttgg

SEQ ID NO: 801 - DNA, 20 bp, Artificial Sequence
  Synthetic
aatgttagtgcctttcaccc

SEQ ID NO: 802 - DNA, 26 bp, Artificial Sequence
  Synthetic
catgaataagagtttggctcaaattg

SEQ ID NO: 803 - DNA, 26 bp, Artificial Sequence
  Synthetic
gagagtaaagtgattggtggaaaatc

SEQ ID NO: 804 - DNA, 23 bp, Artificial Sequence
  Synthetic
aaatgtgagataacgtttggaag

SEQ ID NO: 805 - DNA, 24 bp, Artificial Sequence
  Synthetic
tttcagctttaacgtgattttctg

SEQ ID NO: 806 - DNA, 57 bp, Artificial Sequence; identical to SEQ ID NO: 724
  Synthetic

SEQ ID NO: 807 - DNA, 54 bp, Artificial Sequence; identical to SEQ ID NO: 725
  Synthetic

SEQ ID NO: 808 - DNA, 59 bp, Artificial Sequence
  Synthetic
tcgtcggcagcgtcagatgtgtataagagacagcatgaataagagtttggctcaaattg

SEQ ID NO: 809 - DNA, 60 bp, Artificial Sequence
  Synthetic
gtctcgtgggctcggagatgtgtataagagacaggagagtaaagtgattggtggaaaatc

SEQ ID NO: 810 - DNA, 56 bp, Artificial Sequence
  Synthetic
tcgtcggcagcgtcagatgtgtataagagacagaaatgtgagataacgtttggaag

SEQ ID NO: 811 - DNA, 58 bp, Artificial Sequence
  Synthetic
gtctcgtgggctcggagatgtgtataagagacagtttcagctttaacgtgattttctg

SEQ ID NO: 812 - DNA, 25 bp, Artificial Sequence
  Synthetic
ttttcagtgtaactgcacataagag

SEQ ID NO: 813 - DNA, 21 bp, Artificial Sequence
  Synthetic
gcaaaagttgtcattgttgct

SEQ ID NO: 814 - DNA, 20 bp, Artificial Sequence
  Synthetic
aaaattggctcttttgcttg

SEQ ID NO: 815 - DNA, 24 bp, Artificial Sequence
  Synthetic
cacagagaaaaggtagcctaaaaa

SEQ ID NO: 816 - DNA, 25 bp, Artificial Sequence
  Synthetic
gcaccttggatatatttaatgagaa

SEQ ID NO: 817 - DNA, 23 bp, Artificial Sequence
  Synthetic
caagaattccacttttcacttcc

SEQ ID NO: 818 - DNA, 58 bp, Artificial Sequence
  Synthetic
tcgtcggcagcgtcagatgtgtataagagacagttttcagtgtaactgcacataagag

SEQ ID NO: 819 - DNA, 55 bp, Artificial Sequence
  Synthetic
gtctcgtgggctcggagatgtgtataagagacaggcaaaagttgtcattgttgct

SEQ ID NO: 820 - DNA, 53 bp, Artificial Sequence
  Synthetic
tcgtcggcagcgtcagatgtgtataagagacagaaaattggctcttttgcttg

SEQ ID NO: 821 - DNA, 58 bp, Artificial Sequence
  Synthetic
gtctcgtgggctcggagatgtgtataagagacagcacagagaaaaggtagcctaaaaa

SEQ ID NO: 822 - DNA, 58 bp, Artificial Sequence
  Synthetic
tcgtcggcagcgtcagatgtgtataagagacaggcaccttggatatatttaatgagaa

SEQ ID NO: 823 - DNA, 57 bp, Artificial Sequence
  Synthetic
gtctcgtgggctcggagatgtgtataagagacagcaagaattccacttttcacttcc

SEQ ID NO: 824-899 - skipped (76 entries)

SEQ ID NO: 900 - DNA, 77 bp, Artificial Sequence
  Synthetic
gttttagtactctggaaacagaatctactgaaacaagacaatatgtcgtgtttatcccatcaatttattggtgggat

SEQ ID NO: 901 - DNA, 77 bp, Artificial Sequence
  Synthetic
gtttcagtactctggaaacagaatctactgaaacaagacaatatgtcgtgtttatcccatcaatttattggtgggat

SEQ ID NO: 902 - DNA, 77 bp, Artificial Sequence
  Synthetic
gtttggtaacctaggaaactagatcttaccaaacaagacaatatgtcgtgtttatcccatcaatttattggtgggat

SEQ ID NO: 903 - DNA, 77 bp, Artificial Sequence
  Synthetic
gtttcagtactctggaaacagaatctactgaaacaaggcaaaatgccgtgtttatcccatcaatttattggtgggat

SEQ ID NO: 904 - DNA, 77 bp, Artificial Sequence
  Synthetic
gtttcagtactctggaaacagaatctactgaaacaagacaatatgtcgcgcccatcccatcaatttattggtgggat

SEQ ID NO: 905 - DNA, 77 bp, Artificial Sequence
  Synthetic
gtttcagtactctggaaacagaatctactgaaacaagacaatatgtcgtgtttatgggttgaatttattcgacccat

SEQ ID NO: 906 - DNA, 77 bp, Artificial Sequence
  Synthetic
gtttggtaacctaggaaactagatcttaccaaacaaggcaaaatgccgtgtttatcccatcaatttattggtgggat

SEQ ID NO: 907 - DNA, 77 bp, Artificial Sequence
  Synthetic
gtttggtaacctaggaaactagatcttaccaaacaagacaatatgtcgcgcccatcccatcaatttattggtgggat

SEQ ID NO: 908 - DNA, 77 bp, Artificial Sequence
  Synthetic
gtttggtaacctaggaaactagatcttaccaaacaagacaatatgtcgtgtttatgggttgaatttattcgacccat

SEQ ID NO: 909 - DNA, 77 bp, Artificial Sequence
  Synthetic
gtttcagtactctggaaacagaatctactgaaacaaggcaaaatgccgcgcccatcccatcaatttattggtgggat

SEQ ID NO: 910 - DNA, 77 bp, Artificial Sequence
  Synthetic
gtttcagtactctggaaacagaatctactgaaacaaggcaaaatgccgtgtttatgggttgaatttattcgacccat

SEQ ID NO: 911 - DNA, 77 bp, Artificial Sequence
  Synthetic
gtttcagtactctggaaacagaatctactgaaacaagacaatatgtcgcgcccatgggttgaatttattcgacccat

SEQ ID NO: 912 - DNA, 77 bp, Artificial Sequence
  Synthetic
gtttggtaacctaggaaactagatcttaccaaacaaggcaaaatgccgcgcccatcccatcaatttattggtgggat

SEQ ID NO: 913 - DNA, 77 bp, Artificial Sequence
  Synthetic
gtttggtaacctaggaaactagatcttaccaaacaaggcaaaatgccgtgtttatgggttgaatttattcgacccat

SEQ ID NO: 914 - DNA, 77 bp, Artificial Sequence
  Synthetic
gtttggtaacctaggaaactagatcttaccaaacaagacaatatgtcgcgcccatgggttgaatttattcgacccat

SEQ ID NO: 915 - DNA, 77 bp, Artificial Sequence
  Synthetic
gtttcagtactctggaaacagaatctactgaaacaaggcaaaatgccgcgcccatgggttgaatttattcgacccat

SEQ ID NO: 916 - DNA, 77 bp, Artificial Sequence
  Synthetic
gtttggtaacctaggaaactagatcttaccaaacaaggcaaaatgccgcgcccatgggttgaatttattcgacccat

SEQ ID NO: 917 - DNA, 87 bp, Artificial Sequence
  Synthetic
gtttcagtactctgtgctggaaacagcacagaatctactgaaacaagacaatatgtcgtgtttatcccatcaatttattggtgggat

SEQ ID NO: 918 - RNA, 86 nt, Artificial Sequence
  Synthetic
guuuaaguacucugugcuggaaacagcacagaaucuacugaaacaagacaauaugucguguuuaucccaucaauuuauugguggga

SEQ ID NO: 919 - RNA, 86 nt, Artificial Sequence; identical to SEQ ID NO: 918
  Synthetic

SEQ ID NO: 920 - RNA, 87 nt, Artificial Sequence
  Synthetic
guuucaguacucugugcuggaaacagcacagaaucuacugaaacaagacaauaugucguguuuaucccaucaauuuauuggugggau

SEQ ID NO: 921 - RNA, 87 nt, Artificial Sequence; identical to SEQ ID NO: 920
  Synthetic

SEQ ID NO: 922 - RNA, 77 nt, Artificial Sequence
  Synthetic
guuucaguacucuggaaacagaaucuacugaaacaagacaauaugucguguuuaucccaucaauuuauuggugggau

SEQ ID NO: 923 - RNA, 77 nt, Artificial Sequence; identical to SEQ ID NO: 922
  Synthetic

SEQ ID NO: 924 - RNA, 108 nt, Artificial Sequence
  Synthetic
gguaucuuacaggaacuccaggguuuaaguacucugugcuggaaacagcacagaaucuacugaaacaagacaauaugucguguuuaucccaucaauuuauugguggga

SEQ ID NO: 925 - RNA, 108 nt, Artificial Sequence
  Synthetic
uuuugguaucuuacaggaacucguuuaaguacucugugcuggaaacagcacagaaucuacugaaacaagacaauaugucguguuuaucccaucaauuuauugguggga

SEQ ID NO: 926 - RNA, 109 nt, Artificial Sequence
  Synthetic
gguaucuuacaggaacuccaggguuucaguacucugugcuggaaacagcacagaaucuacugaaacaagacaauaugucguguuuaucccaucaauuuauuggugggau

SEQ ID NO: 927 - RNA, 109 nt, Artificial Sequence
  Synthetic
uuuugguaucuuacaggaacucguuucaguacucugugcuggaaacagcacagaaucuacugaaacaagacaauaugucguguuuaucccaucaauuuauuggugggau

SEQ ID NO: 928 - RNA, 99 nt, Artificial Sequence
  Synthetic
gguaucuuacaggaacuccaggguuucaguacucuggaaacagaaucuacugaaacaagacaauaugucguguuuaucccaucaauuuauuggugggau

SEQ ID NO: 929 - RNA, 99 nt, Artificial Sequence
  Synthetic
uuuugguaucuuacaggaacucguuucaguacucuggaaacagaaucuacugaaacaagacaauaugucguguuuaucccaucaauuuauuggugggau

SEQ ID NO: 930 - RNA, 22 nt, Artificial Sequence
  Synthetic
gguaucuuacaggaacuccagg

SEQ ID NO: 931 - RNA, 22 nt, Artificial Sequence
  Synthetic
uuuugguaucuuacaggaacuc

SEQ ID NO: 932 - DNA, 77 bp, Artificial Sequence
  Synthetic
gtttcagtactctggaaacagaatctactgaaacaaggcaaaatgccgtgtttatctcgtcaacttgttggcgagat

SEQ ID NO: 933-999 - skipped (67 entries)

SEQ ID NO: 1000 - DNA, 22 bp, Artificial Sequence
  Synthetic
tgtttgcagacctcctgccacc

SEQ ID NO: 1001 - DNA, 22 bp, Artificial Sequence
  Synthetic
ctgccaccgcagattcaggctt

SEQ ID NO: 1002 - DNA, 22 bp, Artificial Sequence
  Synthetic
aggattgctgaattatttcttc

SEQ ID NO: 1003 - DNA, 22 bp, Artificial Sequence
  Synthetic
aattatttcttccccagttgca

SEQ ID NO: 1004 - DNA, 22 bp, Artificial Sequence
  Synthetic
cagttgcattcaatgttctgac

SEQ ID NO: 1005 - DNA, 22 bp, Artificial Sequence
  Synthetic
ttctgacaacagtttgccgctg

SEQ ID NO: 1006 - DNA, 22 bp, Artificial Sequence
  Synthetic
caatgccatcctggagttcctg

SEQ ID NO: 1007 - DNA, 22 bp, Artificial Sequence
  Synthetic
taagataccaaaaaggcaaaac

SEQ ID NO: 1008 - DNA, 22 bp, Artificial Sequence
  Synthetic
aaaaaagaggtagggcgacaga

SEQ ID NO: 1009 - DNA, 22 bp, Artificial Sequence
  Synthetic
gacagaaaaaagaggtagggcg

SEQ ID NO: 1010 - DNA, 22 bp, Artificial Sequence
  Synthetic
aaacagctgtcagacagaaaaa

SEQ ID NO: 1011 - DNA, 22 bp, Artificial Sequence
  Synthetic
gaagcctgaatctgcggtggca

SEQ ID NO: 1012 - DNA, 22 bp, Artificial Sequence
  Synthetic
gaaaaattgggaagcctgaatc

SEQ ID NO: 1013 - DNA, 22 bp, Artificial Sequence
  Synthetic
acagatgccagtattctacagg

SEQ ID NO: 1014 - DNA, 22 bp, Artificial Sequence
  Synthetic
tcagcaatcctcaaaaacagat

SEQ ID NO: 1015 - DNA, 22 bp, Artificial Sequence
  Synthetic
aataattcagcaatcctcaaaa

SEQ ID NO: 1016 - DNA, 22 bp, Artificial Sequence
  Synthetic
gcaactggggaagaaataattc

SEQ ID NO: 1017 - DNA, 22 bp, Artificial Sequence
  Synthetic
cattgaatgcaactggggaaga

SEQ ID NO: 1018 - DNA, 22 bp, Artificial Sequence
  Synthetic
gaacattgaatgcaactgggga

SEQ ID NO: 1019 - DNA, 22 bp, Artificial Sequence
  Synthetic
tcattttttctcataccttctg

SEQ ID NO: 1020 - DNA, 22 bp, Artificial Sequence
  Synthetic
ttttttctcataccttctgctt

SEQ ID NO: 1021 - DNA, 22 bp, Artificial Sequence
  Synthetic
ccttctgcttgatgatcatctc

SEQ ID NO: 1022 - DNA, 22 bp, Artificial Sequence
  Synthetic
atgatcatctcgttgatatcct

SEQ ID NO: 1023 - DNA, 22 bp, Artificial Sequence
  Synthetic
aaggtcacccaccatcaccctc

SEQ ID NO: 1024 - DNA, 22 bp, Artificial Sequence
  Synthetic
atcaccctctgtgattttataa

SEQ ID NO: 1025 - DNA, 22 bp, Artificial Sequence
  Synthetic
ataacttgatcaagcagagaaa

SEQ ID NO: 1026 - DNA, 22 bp, Artificial Sequence
  Synthetic
cttgatcaagcagagaaagcca

SEQ ID NO: 1027 - DNA, 22 bp, Artificial Sequence
  Synthetic
atcaagcagagaaagccagtcg

SEQ ID NO: 1028 - DNA, 22 bp, Artificial Sequence
  Synthetic
cagtcggtaagttctgtccaag

SEQ ID NO: 1029 - DNA, 22 bp, Artificial Sequence
  Synthetic
gtaagttctgtccaagcccggt

SEQ ID NO: 1030 - DNA, 22 bp, Artificial Sequence
  Synthetic
agcccggttgaaatctgccaga

SEQ ID NO: 1031 - DNA, 22 bp, Artificial Sequence
  Synthetic
agcaggtacctccaacatcaag

SEQ ID NO: 1032 - DNA, 22 bp, Artificial Sequence
  Synthetic
caacatcaaggaagatggcatt

SEQ ID NO: 1033 - DNA, 22 bp, Artificial Sequence
  Synthetic
aggaagatggcatttctagttt

SEQ ID NO: 1034 - DNA, 22 bp, Artificial Sequence
  Synthetic
atggcatttctagtttggagat

SEQ ID NO: 1035 - DNA, 22 bp, Artificial Sequence
  Synthetic
ctagtttggagatggcagtttc

SEQ ID NO: 1036 - DNA, 22 bp, Artificial Sequence
  Synthetic
gatggcagtttccttagtaacc

SEQ ID NO: 1037 - DNA, 22 bp, Artificial Sequence
  Synthetic
ccacaggttgtgtcaccagagt

SEQ ID NO: 1038 - DNA, 22 bp, Artificial Sequence
  Synthetic
gagtaacagtctgagtaggagc

SEQ ID NO: 1039 - DNA, 22 bp, Artificial Sequence
  Synthetic
agaaggtatgagaaaaaatgat

SEQ ID NO: 1040 - DNA, 22 bp, Artificial Sequence
  Synthetic
tcaagcagaaggtatgagaaaa

SEQ ID NO: 1041 - DNA, 22 bp, Artificial Sequence
  Synthetic
tcatcaagcagaaggtatgaga

SEQ ID NO: 1042 - DNA, 22 bp, Artificial Sequence
  Synthetic
tcaacgagatgatcatcaagca

SEQ ID NO: 1043 - DNA, 22 bp, Artificial Sequence
  Synthetic
gtgaccttgaggatatcaacga

SEQ ID NO: 1044 - DNA, 22 bp, Artificial Sequence
  Synthetic
tgggtgaccttgaggatatcaa

SEQ ID NO: 1045 - DNA, 22 bp, Artificial Sequence
  Synthetic
aagttataaaatcacagagggt

SEQ ID NO: 1046 - DNA, 22 bp, Artificial Sequence
  Synthetic
atcaagttataaaatcacagag

SEQ ID NO: 1047 - DNA, 22 bp, Artificial Sequence
  Synthetic
ctttctctgcttgatcaagtta

SEQ ID NO: 1048 - DNA, 22 bp, Artificial Sequence
  Synthetic
ccgactggctttctctgcttga

SEQ ID NO: 1049 - DNA, 22 bp, Artificial Sequence
  Synthetic
acttaccgactggctttctctg

SEQ ID NO: 1050 - DNA, 22 bp, Artificial Sequence
  Synthetic
gatgttggaggtacctgctctg

SEQ ID NO: 1051 - DNA, 22 bp, Artificial Sequence
  Synthetic
aaatgccatcttccttgatgtt

SEQ ID NO: 1052 - DNA, 22 bp, Artificial Sequence
  Synthetic
ccaaactagaaatgccatcttc

SEQ ID NO: 1053 - DNA, 22 bp, Artificial Sequence
  Synthetic
aggaaactgccatctccaaact

SEQ ID NO: 1054 - DNA, 22 bp, Artificial Sequence
  Synthetic
ctgttactctggtgacacaacc

SEQ ID NO: 1055 - DNA, 22 bp, Artificial Sequence
  Synthetic
tagctcctactcagactgttac

SEQ ID NO: 1056 - DNA, 22 bp, Artificial Sequence
  Synthetic
aaaaggtatctttgatactaac

SEQ ID NO: 1057 - DNA, 22 bp, Artificial Sequence
  Synthetic
ctttgatactaaccttggtttc

SEQ ID NO: 1058 - DNA, 22 bp, Artificial Sequence
  Synthetic
aacatttcattcaactgttgcc

SEQ ID NO: 1059 - DNA, 22 bp, Artificial Sequence
  Synthetic
ttcaactgttgcctccggttct

SEQ ID NO: 1060 - DNA, 22 bp, Artificial Sequence
  Synthetic
aggtgttcttgtacttcatccc

SEQ ID NO: 1061 - DNA, 22 bp, Artificial Sequence
  Synthetic
ttctttcaactagaataaaagg

SEQ ID NO: 1062 - DNA, 22 bp, Artificial Sequence
  Synthetic
ttcaactagaataaaaggaaaa

SEQ ID NO: 1063 - DNA, 22 bp, Artificial Sequence
  Synthetic
agaataaaaggaaaaataaata

SEQ ID NO: 1064 - DNA, 22 bp, Artificial Sequence
  Synthetic
gttagtatcaaagatacctttt

SEQ ID NO: 1065 - DNA, 22 bp, Artificial Sequence
  Synthetic
cacagaaaccaaggttagtatc

SEQ ID NO: 1066 - DNA, 22 bp, Artificial Sequence
  Synthetic
aaagaaaatcacagaaaccaag

SEQ ID NO: 1067 - DNA, 22 bp, Artificial Sequence
  Synthetic
tccaaaagaaaatcacagaaac

SEQ ID NO: 1068 - DNA, 22 bp, Artificial Sequence
  Synthetic
atacagtagatgcaatccaaaa

SEQ ID NO: 1069 - DNA, 22 bp, Artificial Sequence
  Synthetic
aggagggtccctatacagtaga

SEQ ID NO: 1070 - DNA, 22 bp, Artificial Sequence
  Synthetic
atggaaggagggtccctataca

SEQ ID NO: 1071 - DNA, 22 bp, Artificial Sequence
  Synthetic
agtcatggaaggagggtcccta

SEQ ID NO: 1072 - DNA, 22 bp, Artificial Sequence
  Synthetic
tggaagctaaggaagaagctga

SEQ ID NO: 1073 - DNA, 22 bp, Artificial Sequence
  Synthetic
aatgaaatgttaaaggattcaa

SEQ ID NO: 1074 - DNA, 22 bp, Artificial Sequence
  Synthetic
agaaccggaggcaacagttgaa

SEQ ID NO: 1075 - DNA, 22 bp, Artificial Sequence
  Synthetic
gaacaccttcagaaccggaggc

SEQ ID NO: 1076 - DNA, 22 bp, Artificial Sequence
  Synthetic
aaagaattcagaatcagtggga

SEQ ID NO: 1077 - DNA, 22 bp, Artificial Sequence
  Synthetic
attctagttgaaagaattcaga

SEQ ID NO: 1078 - DNA, 22 bp, Artificial Sequence
  Synthetic
atatatttatttttccttttat

SEQ ID NO: 1079-1999 - skipped (921 entries)

SEQ ID NO: 2000 - DNA, 22 bp, Artificial Sequence
  Synthetic
ccctacctcttttttctgtctg

SEQ ID NO: 2001 - DNA, 22 bp, Artificial Sequence
  Synthetic
tttttctgtctgacagctgttt

SEQ ID NO: 2002 - DNA, 22 bp, Artificial Sequence
  Synthetic
tgtttgcagacctcctgccacc

SEQ ID NO: 2003 - DNA, 22 bp, Artificial Sequence
  Synthetic
cagacctcctgccaccgcagat

SEQ ID NO: 2004 - DNA, 22 bp, Artificial Sequence
  Synthetic
ttcaggcttcccaatttttcct

SEQ ID NO: 2005 - DNA, 22 bp, Artificial Sequence
  Synthetic
gtagaatactggcatctgtttt

SEQ ID NO: 2006 - DNA, 22 bp, Artificial Sequence
  Synthetic
ggattgctgaattatttcttcc

SEQ ID NO: 2007 - DNA, 22 bp, Artificial Sequence
  Synthetic
agttgcattcaatgttctgaca

SEQ ID NO: 2008 - DNA, 22 bp, Artificial Sequence
  Synthetic
tgccgctgcccaatgccatcct

SEQ ID NO: 2009 - DNA, 22 bp, Artificial Sequence
  Synthetic
caatgccatcctggagttcctg

SEQ ID NO: 2010 - DNA, 22 bp, Artificial Sequence
  Synthetic
tggagttcctgtaagataccaa

SEQ ID NO: 2011 - DNA, 22 bp, Artificial Sequence
  Synthetic
aagaggtagggcgacagatcta

SEQ ID NO: 2012 - DNA, 22 bp, Artificial Sequence
  Synthetic
gacagaaaaaagaggtagggcg

SEQ ID NO: 2013 - DNA, 22 bp, Artificial Sequence
  Synthetic
agctgtcagacagaaaaaagag

SEQ ID NO: 2014 - DNA, 22 bp, Artificial Sequence
  Synthetic
aaacagctgtcagacagaaaaa

SEQ ID NO: 2015 - DNA, 22 bp, Artificial Sequence
  Synthetic
gcaaacagctgtcagacagaaa

SEQ ID NO: 2016 - DNA, 22 bp, Artificial Sequence
  Synthetic
gaggtctgcaaacagctgtcag

SEQ ID NO: 2017 - DNA, 22 bp, Artificial Sequence
  Synthetic
gcaggaggtctgcaaacagctg

SEQ ID NO: 2018 - DNA, 22 bp, Artificial Sequence
  Synthetic
tgcggtggcaggaggtctgcaa

SEQ ID NO: 2019 - DNA, 22 bp, Artificial Sequence
  Synthetic
gaagcctgaatctgcggtggca

SEQ ID NO: 2020 - DNA, 22 bp, Artificial Sequence
  Synthetic
tgggaagcctgaatctgcggtg

SEQ ID NO: 2021 - DNA, 22 bp, Artificial Sequence
  Synthetic
agtattctacaggaaaaattgg

SEQ ID NO: 2022 - DNA, 22 bp, Artificial Sequence
  Synthetic
caaaaacagatgccagtattct

SEQ ID NO: 2023 - DNA, 22 bp, Artificial Sequence
  Synthetic
cagcaatcctcaaaaacagatg

SEQ ID NO: 2024 - DNA, 22 bp, Artificial Sequence
  Synthetic
aataattcagcaatcctcaaaa

SEQ ID NO: 2025 - DNA, 22 bp, Artificial Sequence
  Synthetic
atgcaactggggaagaaataat

SEQ ID NO: 2026 - DNA, 22 bp, Artificial Sequence
  Synthetic
cagaacattgaatgcaactggg

SEQ ID NO: 2027 - DNA, 22 bp, Artificial Sequence
  Synthetic
attgggcagcggcaaactgttg

SEQ ID NO: 2028 - DNA, 22 bp, Artificial Sequence
  Synthetic
aggaactccaggatggcattgg

SEQ ID NO: 2029 - DNA, 22 bp, Artificial Sequence
  Synthetic
tttttggtatcttacaggaact

SEQ ID NO: 2030 - DNA, 22 bp, Artificial Sequence
  Synthetic
tgttttgcctttttggtatctt

SEQ ID NO: 2031 - DNA, 22 bp, Artificial Sequence
  Synthetic
atgatcatctcgttgatatcct

SEQ ID NO: 2032 - DNA, 22 bp, Artificial Sequence
  Synthetic
ctctgtgattttataacttgat

SEQ ID NO: 2033 - DNA, 22 bp, Artificial Sequence
  Synthetic
tgtgattttataacttgatcaa

SEQ ID NO: 2034 - DNA, 22 bp, Artificial Sequence
  Synthetic
tgattttataacttgatcaagc

SEQ ID NO: 2035 - DNA, 22 bp, Artificial Sequence
  Synthetic
tttataacttgatcaagcagag

SEQ ID NO: 2036 - DNA, 22 bp, Artificial Sequence
  Synthetic
taacttgatcaagcagagaaag

SEQ ID NO: 2037 - DNA, 22 bp, Artificial Sequence
  Synthetic
tcaagcagagaaagccagtcgg

SEQ ID NO: 2038 - DNA, 22 bp, Artificial Sequence
  Synthetic
aagccagtcggtaagttctgtc

SEQ ID NO: 2039 - DNA, 22 bp, Artificial Sequence
  Synthetic
gtccaagcccggttgaaatctg

SEQ ID NO: 2040 - DNA, 22 bp, Artificial Sequence
  Synthetic
ccaagcccggttgaaatctgcc

SEQ ID NO: 2041 - DNA, 22 bp, Artificial Sequence
  Synthetic
agcccggttgaaatctgccaga

SEQ ID NO: 2042 - DNA, 22 bp, Artificial Sequence
  Synthetic
ccagagcaggtacctccaacat

SEQ ID NO: 2043 - DNA, 22 bp, Artificial Sequence
  Synthetic
agcaggtacctccaacatcaag

SEQ ID NO: 2044 - DNA, 22 bp, Artificial Sequence
  Synthetic
aacatcaaggaagatggcattt

SEQ ID NO: 2045 - DNA, 22 bp, Artificial Sequence
  Synthetic
aggaagatggcatttctagttt

SEQ ID NO: 2046 - DNA, 22 bp, Artificial Sequence
  Synthetic
tggcatttctagtttggagatg

SEQ ID NO: 2047 - DNA, 22 bp, Artificial Sequence
  Synthetic
tagtttggagatggcagtttcc

SEQ ID NO: 2048 - DNA, 22 bp, Artificial Sequence
  Synthetic
gatggcagtttccttagtaacc

SEQ ID NO: 2049 - DNA, 22 bp, Artificial Sequence
  Synthetic
ttagtaaccacaggttgtgtca

SEQ ID NO: 2050 - DNA, 22 bp, Artificial Sequence
  Synthetic
agtaaccacaggttgtgtcacc

SEQ ID NO: 2051 - DNA, 22 bp, Artificial Sequence
  Synthetic
cacaggttgtgtcaccagagta

SEQ ID NO: 2052 - DNA, 22 bp, Artificial Sequence
  Synthetic
ttgtgtcaccagagtaacagtc

SEQ ID NO: 2053 - DNA, 22 bp, Artificial Sequence
  Synthetic
tgtcaccagagtaacagtctga

SEQ ID NO: 2054 - DNA, 22 bp, Artificial Sequence
  Synthetic
caccagagtaacagtctgagta

SEQ ID NO: 2055 - DNA, 22 bp, Artificial Sequence
  Synthetic
aaaatattttgggtttttgcaa

SEQ ID NO: 2056 - DNA, 22 bp, Artificial Sequence
  Synthetic
gaaaaaatgataaaagttggca

SEQ ID NO: 2057 - DNA, 22 bp, Artificial Sequence
  Synthetic
tgagaaaaaatgataaaagttg

SEQ ID NO: 2058 - DNA, 22 bp, Artificial Sequence
  Synthetic
gaaggtatgagaaaaaatgata

SEQ ID NO: 2059 - DNA, 22 bp, Artificial Sequence
  Synthetic
gatgatcatcaagcagaaggta

SEQ ID NO: 2060 - DNA, 22 bp, Artificial Sequence
  Synthetic
tcaacgagatgatcatcaagca

SEQ ID NO: 2061 - DNA, 22 bp, Artificial Sequence
  Synthetic
atatcaacgagatgatcatcaa

SEQ ID NO: 2062 - DNA, 22 bp, Artificial Sequence
  Synthetic
aggatatcaacgagatgatcat

SEQ ID NO: 2063 - DNA, 22 bp, Artificial Sequence
  Synthetic
tgggtgaccttgaggatatcaa

SEQ ID NO: 2064 - DNA, 22 bp, Artificial Sequence
  Synthetic
agagggtgatggtgggtgacct

SEQ ID NO: 2065 - DNA, 22 bp, Artificial Sequence
  Synthetic
cttgatcaagttataaaatcac

SEQ ID NO: 2066 - DNA, 22 bp, Artificial Sequence
  Synthetic
tgcttgatcaagttataaaatc

SEQ ID NO: 2067 - DNA, 22 bp, Artificial Sequence
  Synthetic
cgactggctttctctgcttgat

SEQ ID NO: 2068 - DNA, 22 bp, Artificial Sequence
  Synthetic
ggcagatttcaaccgggcttgg

SEQ ID NO: 2069 - DNA, 22 bp, Artificial Sequence
  Synthetic
gatgttggaggtacctgctctg

SEQ ID NO: 2070 - DNA, 22 bp, Artificial Sequence
  Synthetic
aaatgccatcttccttgatgtt

SEQ ID NO: 2071 - DNA, 22 bp, Artificial Sequence
  Synthetic
taaggaaactgccatctccaaa

SEQ ID NO: 2072 - DNA, 22 bp, Artificial Sequence
  Synthetic
tggtgacacaacctgtggttac

SEQ ID NO: 2073 - DNA, 22 bp, Artificial Sequence
  Synthetic
cccaaaatattttagctcctac

SEQ ID NO: 2074 - DNA, 22 bp, Artificial Sequence
  Synthetic
ttttgcaaaaacccaaaatatt

SEQ ID NO: 2075 - DNA, 22 bp, Artificial Sequence
  Synthetic
tcttttggattgcatctactgt

SEQ ID NO: 2076 - DNA, 22 bp, Artificial Sequence
  Synthetic
tagggaccctccttccatgact

SEQ ID NO: 2077 - DNA, 22 bp, Artificial Sequence
  Synthetic
caagcttggctctggcctgtcc

SEQ ID NO: 2078 - DNA, 22 bp, Artificial Sequence
  Synthetic
tctggcctgtcctaagacctgc

SEQ ID NO: 2079 - DNA, 22 bp, Artificial Sequence
  Synthetic
taagacctgctcagcttcttcc

SEQ ID NO: 2080 - DNA, 22 bp, Artificial Sequence
  Synthetic
tgctcagcttcttccttagctt

SEQ ID NO: 2081 - DNA, 22 bp, Artificial Sequence
  Synthetic
ttcaactgttgcctccggttct

SEQ ID NO: 2082 - DNA, 22 bp, Artificial Sequence
  Synthetic
cactgattctgaattctttcaa

SEQ ID NO: 2083 - DNA, 22 bp, Artificial Sequence
  Synthetic
ctgaattctttcaactagaata

SEQ ID NO: 2084 - DNA, 22 bp, Artificial Sequence
  Synthetic
gaataaaaggaaaaataaatat

SEQ ID NO: 2085 - DNA, 22 bp, Artificial Sequence
  Synthetic
taaaaggaaaaataaatatata

SEQ ID NO: 2086 - DNA, 22 bp, Artificial Sequence
  Synthetic
cacagaaaccaaggttagtatc

SEQ ID NO: 2087 - DNA, 22 bp, Artificial Sequence
  Synthetic
aagaaaatcacagaaaccaagg

SEQ ID NO: 2088 - DNA, 22 bp, Artificial Sequence
  Synthetic
tccaaaagaaaatcacagaaac

SEQ ID NO: 2089 - DNA, 22 bp, Artificial Sequence
  Synthetic
agatgcaatccaaaagaaaatc

SEQ ID NO: 2090 - DNA, 22 bp, Artificial Sequence
  Synthetic
cctatacagtagatgcaatcca

SEQ ID NO: 2091 - DNA, 22 bp, Artificial Sequence
  Synthetic
atggaaggagggtccctataca

SEQ ID NO: 2092 - DNA, 22 bp, Artificial Sequence
  Synthetic
gtcatggaaggagggtccctat

SEQ ID NO: 2093 - DNA, 22 bp, Artificial Sequence
  Synthetic
gagccaagcttgagtcatggaa

SEQ ID NO: 2094 - DNA, 22 bp, Artificial Sequence
  Synthetic
ccagagccaagcttgagtcatg

SEQ ID NO: 2095 - DNA, 22 bp, Artificial Sequence
  Synthetic
taggacaggccagagccaagct

SEQ ID NO: 2096 - DNA, 22 bp, Artificial Sequence
  Synthetic
aggtcttaggacaggccagagc

SEQ ID NO: 2097 - DNA, 22 bp, Artificial Sequence
  Synthetic
tgagcaggtcttaggacaggcc

SEQ ID NO: 2098 - DNA, 22 bp, Artificial Sequence
  Synthetic
gctgagcaggtcttaggacagg

SEQ ID NO: 2099 - DNA, 22 bp, Artificial Sequence
  Synthetic
aagaagctgagcaggtcttagg

SEQ ID NO: 2100 - DNA, 22 bp, Artificial Sequence
  Synthetic
taaggaagaagctgagcaggtc

SEQ ID NO: 2101 - DNA, 22 bp, Artificial Sequence
  Synthetic
tggaagctaaggaagaagctga

SEQ ID NO: 2102 - DNA, 22 bp, Artificial Sequence
  Synthetic
ggctggaagctaaggaagaagc

SEQ ID NO: 2103 - DNA, 22 bp, Artificial Sequence
  Synthetic
acaatggctggaagctaaggaa

SEQ ID NO: 2104 - DNA, 22 bp, Artificial Sequence
  Synthetic
aacacaatggctggaagctaag

SEQ ID NO: 2105-2106 - skipped (2 entries)

SEQ ID NO: 2107 - DNA, 22 bp, Artificial Sequence
  Synthetic
ggcaacagttgaatgaaatgtt

SEQ ID NO: 2108 - DNA, 22 bp, Artificial Sequence
  Synthetic
aacaccttcagaaccggaggca

SEQ ID NO: 2109 - DNA, 22 bp, Artificial Sequence
  Synthetic
gtacaagaacaccttcagaacc

SEQ ID NO: 2110 - DNA, 22 bp, Artificial Sequence
  Synthetic
gggatgaagtacaagaacacct

SEQ ID NO: 2111 - DNA, 22 bp, Artificial Sequence
  Synthetic
tcagaatcagtgggatgaagta

SEQ ID NO: 2112 - DNA, 22 bp, Artificial Sequence
  Synthetic
aagaattcagaatcagtgggat

SEQ ID NO: 2113 - DNA, 22 bp, Artificial Sequence
  Synthetic
ttctagttgaaagaattcagaa

SEQ ID NO: 2114 - DNA, 22 bp, Artificial Sequence
  Synthetic
cttttattctagttgaaagaat

SEQ ID NO: 2115 - DNA, 22 bp, Artificial Sequence
  Synthetic
atttttccttttattctagttg

SEQ ID NO: 2116 - DNA, 22 bp, Artificial Sequence
  Synthetic
tatatttatttttccttttatt

SEQ ID NO: 2117-2999 - skipped (883 entries)

SEQ ID NO: 3000 - DNA, 20 bp, Artificial Sequence
  Synthetic
aatgctgctgtcttcttgct

SEQ ID NO: 3001 - DNA, 21 bp, Artificial Sequence
  Synthetic
caatgctgctgtcttcttgct

SEQ ID NO: 3002 - DNA, 20 bp, Artificial Sequence
  Synthetic
aacaaaatgtacaaggaccg

SEQ ID NO: 3003 - DNA, 21 bp, Artificial Sequence
  Synthetic
aacaaaatgtacaaggaccga

SEQ ID NO: 3004 - DNA, 20 bp, Artificial Sequence
  Synthetic
tgcaaagtgcaacgcctgtg

SEQ ID NO: 3005 - DNA, 21 bp, Artificial Sequence
  Synthetic
tgcaaagtgcaacgcctgtgg

SEQ ID NO: 3006 - DNA, 20 bp, Artificial Sequence
  Synthetic
atagtctacaacaaagctca

SEQ ID NO: 3007 - DNA, 21 bp, Artificial Sequence
  Synthetic
atagtctacaacaaagctcag

SEQ ID NO: 3008 - DNA, 20 bp, Artificial Sequence
  Synthetic
ctgttttaaaatttttatat

SEQ ID NO: 3009 - DNA, 21 bp, Artificial Sequence
  Synthetic
ctgttttaaaatttttatatt

SEQ ID NO: 3010 - DNA, 20 bp, Artificial Sequence
  Synthetic
ttagcatgttcccaattctc

SEQ ID NO: 3011 - DNA, 21 bp, Artificial Sequence
  Synthetic
tttagcatgttcccaattctc

SEQ ID NO: 3012 - DNA, 20 bp, Artificial Sequence
  Synthetic
tcgcctgcaggtaaaagcat

SEQ ID NO: 3013 - DNA, 21 bp, Artificial Sequence
  Synthetic
atcgcctgcaggtaaaagcat

SEQ ID NO: 3014 - DNA, 20 bp, Artificial Sequence
  Synthetic
tctcagaaagacacaaattc

SEQ ID NO: 3015 - DNA, 21 bp, Artificial Sequence
  Synthetic
tctcagaaagacacaaattcc

SEQ ID NO: 3016 - DNA, 20 bp, Artificial Sequence
  Synthetic
aggcttcccaatttttcctg

SEQ ID NO: 3017 - DNA, 21 bp, Artificial Sequence
  Synthetic
caggcttcccaatttttcctg

SEQ ID NO: 3018 - DNA, 20 bp, Artificial Sequence
  Synthetic
gaatactggcatctgttttt

SEQ ID NO: 3019 - DNA, 21 bp, Artificial Sequence
  Synthetic
agaatactggcatctgttttt

SEQ ID NO: 3020 - DNA, 20 bp, Artificial Sequence
  Synthetic
gcatctgtttttgaggattg

SEQ ID NO: 3021 - DNA, 21 bp, Artificial Sequence
  Synthetic
ggcatctgtttttgaggattg

SEQ ID NO: 3022 - DNA, 20 bp, Artificial Sequence
  Synthetic
gccgctgcccaatgccatcc

SEQ ID NO: 3023 - DNA, 21 bp, Artificial Sequence
  Synthetic
tgccgctgcccaatgccatcc

SEQ ID NO: 3024 - DNA, 20 bp, Artificial Sequence
  Synthetic
gaggtagggcgacagatcta

SEQ ID NO: 3025 - DNA, 21 bp, Artificial Sequence
  Synthetic
gaggtagggcgacagatctaa

SEQ ID NO: 3026 - DNA, 20 bp, Artificial Sequence
  Synthetic
tctacaggaaaaattgggaa

SEQ ID NO: 3027 - DNA, 21 bp, Artificial Sequence
  Synthetic
tctacaggaaaaattgggaag

SEQ ID NO: 3028 - DNA, 20 bp, Artificial Sequence
  Synthetic
gcggcaaactgttgtcagaa

SEQ ID NO: 3029 - DNA, 21 bp, Artificial Sequence
  Synthetic
gcggcaaactgttgtcagaac

SEQ ID NO: 3030 - DNA, 20 bp, Artificial Sequence
  Synthetic
ttttggtatcttacaggaac

SEQ ID NO: 3031 - DNA, 21 bp, Artificial Sequence
  Synthetic
ttttggtatcttacaggaact

SEQ ID NO: 3032 - DNA, 20 bp, Artificial Sequence
  Synthetic
actattggagcctgtaagta

SEQ ID NO: 3033 - DNA, 21 bp, Artificial Sequence
  Synthetic
actattggagcctgtaagtat

SEQ ID NO: 3034 - DNA, 20 bp, Artificial Sequence
  Synthetic
aggaagttagaagatctgag

SEQ ID NO: 3035 - DNA, 21 bp, Artificial Sequence
  Synthetic
aggaagttagaagatctgagc

SEQ ID NO: 3036 - DNA, 20 bp, Artificial Sequence
  Synthetic
gtaaccacaggttgtgtcac

SEQ ID NO: 3037 - DNA, 21 bp, Artificial Sequence
  Synthetic
agtaaccacaggttgtgtcac

SEQ ID NO: 3038 - DNA, 20 bp, Artificial Sequence
  Synthetic
tgtgtcaccagagtaacagt

SEQ ID NO: 3039 - DNA, 21 bp, Artificial Sequence
  Synthetic
ttgtgtcaccagagtaacagt

SEQ ID NO: 3040 - DNA, 20 bp, Artificial Sequence
  Synthetic
tgagtaggagctaaaatatt

SEQ ID NO: 3041 - DNA, 21 bp, Artificial Sequence
  Synthetic
ctgagtaggagctaaaatatt

SEQ ID NO: 3042 - DNA, 20 bp, Artificial Sequence
  Synthetic
gagggtgatggtgggtgacc

SEQ ID NO: 3043 - DNA, 21 bp, Artificial Sequence
  Synthetic
gagggtgatggtgggtgacct

SEQ ID NO: 3044 - DNA, 20 bp, Artificial Sequence
  Synthetic
tataaaatcacagagggtga

SEQ ID NO: 3045 - DNA, 21 bp, Artificial Sequence
  Synthetic
tataaaatcacagagggtgat

SEQ ID NO: 3046 - DNA, 20 bp, Artificial Sequence
  Synthetic
ttgatcaagttataaaatca

SEQ ID NO: 3047 - DNA, 21 bp, Artificial Sequence
  Synthetic
ttgatcaagttataaaatcac

SEQ ID NO: 3048 - DNA, 20 bp, Artificial Sequence
  Synthetic
ttggtttctgtgattttctt

SEQ ID NO: 3049 - DNA, 21 bp, Artificial Sequence
  Synthetic
cttggtttctgtgattttctt

SEQ ID NO: 3050 - DNA, 20 bp, Artificial Sequence
  Synthetic
cttagcttccagccattgtg

SEQ ID NO: 3051 - DNA, 21 bp, Artificial Sequence
  Synthetic
ccttagcttccagccattgtg

SEQ ID NO: 3052 - DNA, 20 bp, Artificial Sequence
  Synthetic
tgtacttcatcccactgatt

SEQ ID NO: 3053 - DNA, 21 bp, Artificial Sequence
  Synthetic
ttgtacttcatcccactgatt

SEQ ID NO: 3054 - DNA, 20 bp, Artificial Sequence
  Synthetic
tgattctgaattctttcaac

SEQ ID NO: 3055 - DNA, 21 bp, Artificial Sequence
  Synthetic
ctgattctgaattctttcaac

SEQ ID NO: 3056 - DNA, 20 bp, Artificial Sequence
  Synthetic
agccaagcttgagtcatgga

SEQ ID NO: 3057 - DNA, 21 bp, Artificial Sequence
  Synthetic
agccaagcttgagtcatggaa

SEQ ID NO: 3058 - DNA, 20 bp, Artificial Sequence
  Synthetic
ttaggacaggccagagccaa

SEQ ID NO: 3059 - DNA, 21 bp, Artificial Sequence
  Synthetic
ttaggacaggccagagccaag

SEQ ID NO: 3060 - DNA, 20 bp, Artificial Sequence
  Synthetic
gcaacagttgaatgaaatgt

SEQ ID NO: 3061 - DNA, 21 bp, Artificial Sequence
  Synthetic
gcaacagttgaatgaaatgtt

SEQ ID NO: 3062 - DNA, 20 bp, Artificial Sequence
  Synthetic
ccttcagaaccggaggcaac

SEQ ID NO: 3063 - DNA, 21 bp, Artificial Sequence
  Synthetic
ccttcagaaccggaggcaaca

SEQ ID NO: 3064 - DNA, 20 bp, Artificial Sequence
  Synthetic
agttgaaagaattcagaatc

SEQ ID NO: 3065 - DNA, 21 bp, Artificial Sequence
  Synthetic
agttgaaagaattcagaatca

SEQ ID NO: 3066 - DNA, 20 bp, Artificial Sequence
  Synthetic
ttttattctagttgaaagaa

SEQ ID NO: 3067 - DNA, 21 bp, Artificial Sequence
  Synthetic
ttttattctagttgaaagaat

SEQ ID NO: 3068 - DNA, 20 bp, Artificial Sequence
  Synthetic
tttttccttttattctagtt

SEQ ID NO: 3069 - DNA, 21 bp, Artificial Sequence
  Synthetic
tttttccttttattctagttg

SEQ ID NO: 3070-3999 - skipped (930 entries)

SEQ ID NO: 4000 - DNA, 20 bp, Artificial Sequence
  Synthetic
atatgtgttacctacccttg

SEQ ID NO: 4001 - DNA, 21 bp, Artificial Sequence
  Synthetic
tatatgtgttacctacccttg

SEQ ID NO: 4002 - DNA, 20 bp, Artificial Sequence
  Synthetic
attttgttaactttttccca

SEQ ID NO: 4003 - DNA, 21 bp, Artificial Sequence
  Synthetic
cattttgttaactttttccca

SEQ ID NO: 4004 - DNA, 20 bp, Artificial Sequence
  Synthetic
ttttcccattggaaatcaag

SEQ ID NO: 4005 - DNA, 21 bp, Artificial Sequence
  Synthetic
tttttcccattggaaatcaag

SEQ ID NO: 4006 - DNA, 20 bp, Artificial Sequence
  Synthetic
tttcccattggaaatcaagc

SEQ ID NO: 4007 - DNA, 21 bp, Artificial Sequence
  Synthetic
ttttcccattggaaatcaagc

SEQ ID NO: 4008 - DNA, 20 bp, Artificial Sequence
  Synthetic
ctgtagcttcaccctttcca

SEQ ID NO: 4009 - DNA, 21 bp, Artificial Sequence
  Synthetic
cctgtagcttcaccctttcca

SEQ ID NO: 4010 - DNA, 20 bp, Artificial Sequence
  Synthetic
aatgtacaaggaccgacaag

SEQ ID NO: 4011 - DNA, 21 bp, Artificial Sequence
  Synthetic
aatgtacaaggaccgacaagg

SEQ ID NO: 4012 - DNA, 20 bp, Artificial Sequence
  Synthetic
acaaaatgtacaaggaccga

SEQ ID NO: 4013 - DNA, 21 bp, Artificial Sequence
  Synthetic
acaaaatgtacaaggaccgac

SEQ ID NO: 4014 - DNA, 20 bp, Artificial Sequence
  Synthetic
aacaaaatgtacaaggaccg

SEQ ID NO: 4015 - DNA, 21 bp, Artificial Sequence
  Synthetic
aacaaaatgtacaaggaccga

SEQ ID NO: 4016 - DNA, 20 bp, Artificial Sequence
  Synthetic
ggaaaaagttaacaaaatgt

SEQ ID NO: 4017 - DNA, 21 bp, Artificial Sequence
  Synthetic
ggaaaaagttaacaaaatgta

SEQ ID NO: 4018 - DNA, 20 bp, Artificial Sequence
  Synthetic
tctctcccagcttgatttcc

SEQ ID NO: 4019 - DNA, 21 bp, Artificial Sequence
  Synthetic
tctctcccagcttgatttcca

SEQ ID NO: 4020 - DNA, 20 bp, Artificial Sequence
  Synthetic
ctctctcccagcttgatttc

SEQ ID NO: 4021 - DNA, 21 bp, Artificial Sequence
  Synthetic
ctctctcccagcttgatttcc

SEQ ID NO: 4022 - DNA, 20 bp, Artificial Sequence
  Synthetic
gcctgtggaaagggtgaagc

SEQ ID NO: 4023 - DNA, 21 bp, Artificial Sequence
  Synthetic
gcctgtggaaagggtgaagct

SEQ ID NO: 4024 - DNA, 20 bp, Artificial Sequence
  Synthetic
gcaaagtgcaacgcctgtgg

SEQ ID NO: 4025 - DNA, 21 bp, Artificial Sequence
  Synthetic
gcaaagtgcaacgcctgtgga

SEQ ID NO: 4026 - DNA, 20 bp, Artificial Sequence
  Synthetic
tgcaaagtgcaacgcctgtg

SEQ ID NO: 4027 - DNA, 21 bp, Artificial Sequence
  Synthetic
tgcaaagtgcaacgcctgtgg

SEQ ID NO: 4028 - DNA, 20 bp, Artificial Sequence
  Synthetic
agcattgcaaagtgcaacgc

SEQ ID NO: 4029 - DNA, 21 bp, Artificial Sequence
  Synthetic
agcattgcaaagtgcaacgcc

SEQ ID NO: 4030 - DNA, 20 bp, Artificial Sequence
  Synthetic
atagtctacaacaaagctca

SEQ ID NO: 4031 - DNA, 21 bp, Artificial Sequence
  Synthetic
atagtctacaacaaagctcag

SEQ ID NO: 4032 - DNA, 20 bp, Artificial Sequence
  Synthetic
aaagatagtctacaacaaag

SEQ ID NO: 4033 - DNA, 21 bp, Artificial Sequence
  Synthetic
aaagatagtctacaacaaagc

SEQ ID NO: 4034 - DNA, 20 bp, Artificial Sequence
  Synthetic
tttagcatgttcccaattct

SEQ ID NO: 4035 - DNA, 21 bp, Artificial Sequence
  Synthetic
atttagcatgttcccaattct

SEQ ID NO: 4036 - DNA, 20 bp, Artificial Sequence
  Synthetic
cagatctgtcaaatcgcctg

SEQ ID NO: 4037 - DNA, 21 bp, Artificial Sequence
  Synthetic
acagatctgtcaaatcgcctg

SEQ ID NO: 4038 - DNA, 20 bp, Artificial Sequence
  Synthetic
tcgcctgcaggtaaaagcat

SEQ ID NO: 4039 - DNA, 21 bp, Artificial Sequence
  Synthetic
atcgcctgcaggtaaaagcat

SEQ ID NO: 4040 - DNA, 20 bp, Artificial Sequence
  Synthetic
tgctaaatacaaatggtatc

SEQ ID NO: 4041 - DNA, 21 bp, Artificial Sequence
  Synthetic
tgctaaatacaaatggtatct

SEQ ID NO: 4042 - DNA, 20 bp, Artificial Sequence
  Synthetic
attgggaacatgctaaatac

SEQ ID NO: 4043 - DNA, 21 bp, Artificial Sequence
  Synthetic
attgggaacatgctaaataca

SEQ ID NO: 4044 - DNA, 20 bp, Artificial Sequence
  Synthetic
aaagacacaaattcctgaga

SEQ ID NO: 4045 - DNA, 21 bp, Artificial Sequence
  Synthetic
aaagacacaaattcctgagaa

SEQ ID NO: 4046 - DNA, 20 bp, Artificial Sequence
  Synthetic
gaaagacacaaattcctgag

SEQ ID NO: 4047 - DNA, 21 bp, Artificial Sequence
  Synthetic
gaaagacacaaattcctgaga

SEQ ID NO: 4048 - DNA, 20 bp, Artificial Sequence
  Synthetic
atgatataaagatatttaat

SEQ ID NO: 4049 - DNA, 21 bp, Artificial Sequence
  Synthetic
atgatataaagatatttaatc

SEQ ID NO: 4050 - DNA, 20 bp, Artificial Sequence
  Synthetic
ttgacagatctgttgagaaa

SEQ ID NO: 4051 - DNA, 21 bp, Artificial Sequence
  Synthetic
ttgacagatctgttgagaaat

SEQ ID NO: 4052 - DNA, 20 bp, Artificial Sequence
  Synthetic
gatttgacagatctgttgag

SEQ ID NO: 4053 - DNA, 21 bp, Artificial Sequence
  Synthetic
gatttgacagatctgttgaga

SEQ ID NO: 4054 - DNA, 20 bp, Artificial Sequence
  Synthetic
ttgatccatatgcttttacc

SEQ ID NO: 4055 - DNA, 21 bp, Artificial Sequence
  Synthetic
ttgatccatatgcttttacct

SEQ ID NO: 4056 - DNA, 20 bp, Artificial Sequence
  Synthetic
acctcctgccaccgcagatt

SEQ ID NO: 4057 - DNA, 21 bp, Artificial Sequence
  Synthetic
gacctcctgccaccgcagatt

SEQ ID NO: 4058 - DNA, 20 bp, Artificial Sequence
  Synthetic
ccaatttttcctgtagaata

SEQ ID NO: 4059 - DNA, 21 bp, Artificial Sequence
  Synthetic
cccaatttttcctgtagaata

SEQ ID NO: 4060 - DNA, 20 bp, Artificial Sequence
  Synthetic
gaatactggcatctgttttt

SEQ ID NO: 4061 - DNA, 21 bp, Artificial Sequence
  Synthetic
agaatactggcatctgttttt

SEQ ID NO: 4062 - DNA, 20 bp, Artificial Sequence
  Synthetic
tgccgctgcccaatgccatc

SEQ ID NO: 4063 - DNA, 21 bp, Artificial Sequence
  Synthetic
ttgccgctgcccaatgccatc

SEQ ID NO: 4064 - DNA, 20 bp, Artificial Sequence
  Synthetic
agttcctgtaagataccaaa

SEQ ID NO: 4065 - DNA, 21 bp, Artificial Sequence
  Synthetic
gagttcctgtaagataccaaa

SEQ ID NO: 4066 - DNA, 20 bp, Artificial Sequence
  Synthetic
agaggtagggcgacagatct

SEQ ID NO: 4067 - DNA, 21 bp, Artificial Sequence
  Synthetic
agaggtagggcgacagatcta

SEQ ID NO: 4068 - DNA, 20 bp, Artificial Sequence
  Synthetic
ctgtcagacagaaaaaagag

SEQ ID NO: 4069 - DNA, 21 bp, Artificial Sequence
  Synthetic
ctgtcagacagaaaaaagagg

SEQ ID NO: 4070 - DNA, 20 bp, Artificial Sequence
  Synthetic
gctgtcagacagaaaaaaga

SEQ ID NO: 4071 - DNA, 21 bp, Artificial Sequence
  Synthetic
gctgtcagacagaaaaaagag

SEQ ID NO: 4072 - DNA, 20 bp, Artificial Sequence
  Synthetic
aacagctgtcagacagaaaa

SEQ ID NO: 4073 - DNA, 21 bp, Artificial Sequence
  Synthetic
aacagctgtcagacagaaaaa

SEQ ID NO: 4074 - DNA, 20 bp, Artificial Sequence
  Synthetic
aagcctgaatctgcggtggc

SEQ ID NO: 4075 - DNA, 21 bp, Artificial Sequence
  Synthetic
aagcctgaatctgcggtggca

SEQ ID NO: 4076 - DNA, 20 bp, Artificial Sequence
  Synthetic
gggaagcctgaatctgcggt

SEQ ID NO: 4077 - DNA, 21 bp, Artificial Sequence
  Synthetic
gggaagcctgaatctgcggtg

SEQ ID NO: 4078 - DNA, 20 bp, Artificial Sequence
  Synthetic
aattgggaagcctgaatctg

SEQ ID NO: 4079 - DNA, 21 bp, Artificial Sequence
  Synthetic
aattgggaagcctgaatctgc

SEQ ID NO: 4080 - DNA, 20 bp, Artificial Sequence
  Synthetic
aaaaattgggaagcctgaat

SEQ ID NO: 4081 - DNA, 21 bp, Artificial Sequence
  Synthetic
aaaaattgggaagcctgaatc

SEQ ID NO: 4082 - DNA, 20 bp, Artificial Sequence
  Synthetic
gccagtattctacaggaaaa

SEQ ID NO: 4083 - DNA, 21 bp, Artificial Sequence
  Synthetic
gccagtattctacaggaaaaa

SEQ ID NO: 4084 - DNA, 20 bp, Artificial Sequence
  Synthetic
tgccagtattctacaggaaa

SEQ ID NO: 4085 - DNA, 21 bp, Artificial Sequence
  Synthetic
tgccagtattctacaggaaaa

SEQ ID NO: 4086 - DNA, 20 bp, Artificial Sequence
  Synthetic
aaaaacagatgccagtattc

SEQ ID NO: 4087 - DNA, 21 bp, Artificial Sequence
  Synthetic
aaaaacagatgccagtattct

SEQ ID NO: 4088 - DNA, 20 bp, Artificial Sequence
  Synthetic
tgtcagaacattgaatgcaa

SEQ ID NO: 4089 - DNA, 21 bp, Artificial Sequence
  Synthetic
tgtcagaacattgaatgcaac

SEQ ID NO: 4090 - DNA, 20 bp, Artificial Sequence
  Synthetic
ttgtcagaacattgaatgca

SEQ ID NO: 4091 - DNA, 21 bp, Artificial Sequence
  Synthetic
ttgtcagaacattgaatgcaa

SEQ ID NO: 4092 - DNA, 20 bp, Artificial Sequence
  Synthetic
gttgtcagaacattgaatgc

SEQ ID NO: 4093 - DNA, 21 bp, Artificial Sequence
  Synthetic
gttgtcagaacattgaatgca

SEQ ID NO: 4094 - DNA, 20 bp, Artificial Sequence
  Synthetic
aactccaggatggcattggg

SEQ ID NO: 4095 - DNA, 21 bp, Artificial Sequence
  Synthetic
aactccaggatggcattgggc

SEQ ID NO: 4096 - DNA, 20 bp, Artificial Sequence
  Synthetic
tacaggaactccaggatggc

SEQ ID NO: 4097 - DNA, 21 bp, Artificial Sequence
  Synthetic
tacaggaactccaggatggca

SEQ ID NO: 4098 - DNA, 20 bp, Artificial Sequence
  Synthetic
ttacaggaactccaggatgg

SEQ ID NO: 4099 - DNA, 21 bp, Artificial Sequence
  Synthetic
ttacaggaactccaggatggc

SEQ ID NO: 4100 - DNA, 20 bp, Artificial Sequence
  Synthetic
ggtatcttacaggaactcca

SEQ ID NO: 4101 - DNA, 21 bp, Artificial Sequence
  Synthetic
ggtatcttacaggaactccag

SEQ ID NO: 4102 - DNA, 20 bp, Artificial Sequence
  Synthetic
ttttggtatcttacaggaac

SEQ ID NO: 4103 - DNA, 21 bp, Artificial Sequence
  Synthetic
ttttggtatcttacaggaact

SEQ ID NO: 4104 - DNA, 20 bp, Artificial Sequence
  Synthetic
gttttgcctttttggtatct

SEQ ID NO: 4105 - DNA, 21 bp, Artificial Sequence
  Synthetic
gttttgcctttttggtatctt

SEQ ID NO: 4106 - DNA, 20 bp, Artificial Sequence
  Synthetic
tcttttctcaaataaaaaga

SEQ ID NO: 4107 - DNA, 21 bp, Artificial Sequence
  Synthetic
tcttttctcaaataaaaagac

SEQ ID NO: 4108 - DNA, 20 bp, Artificial Sequence
  Synthetic
aatgggatccagtatactta

SEQ ID NO: 4109 - DNA, 21 bp, Artificial Sequence
  Synthetic
gaatgggatccagtatactta

SEQ ID NO: 4110 - DNA, 20 bp, Artificial Sequence
  Synthetic
tatacttacaggctccaata

SEQ ID NO: 4111 - DNA, 21 bp, Artificial Sequence
  Synthetic
gtatacttacaggctccaata

SEQ ID NO: 4112 - DNA, 20 bp, Artificial Sequence
  Synthetic
ggctccaatagtggtcagtc

SEQ ID NO: 4113 - DNA, 21 bp, Artificial Sequence
  Synthetic
aggctccaatagtggtcagtc

SEQ ID NO: 4114 - DNA, 20 bp, Artificial Sequence
  Synthetic
atagtggtcagtccaggagc

SEQ ID NO: 4115 - DNA, 21 bp, Artificial Sequence
  Synthetic
aatagtggtcagtccaggagc

SEQ ID NO: 4116 - DNA, 20 bp, Artificial Sequence
  Synthetic
ggtcagtccaggagctaggt

SEQ ID NO: 4117 - DNA, 21 bp, Artificial Sequence
  Synthetic
tggtcagtccaggagctaggt

SEQ ID NO: 4118 - DNA, 20 bp, Artificial Sequence
  Synthetic
gccctcagctcttgaagtaa

SEQ ID NO: 4119 - DNA, 21 bp, Artificial Sequence
  Synthetic
tgccctcagctcttgaagtaa

SEQ ID NO: 4120 - DNA, 20 bp, Artificial Sequence
  Synthetic
agtatactggatcccattct

SEQ ID NO: 4121 - DNA, 21 bp, Artificial Sequence
  Synthetic
agtatactggatcccattctc

SEQ ID NO: 4122 - DNA, 20 bp, Artificial Sequence
  Synthetic
actattggagcctgtaagta

SEQ ID NO: 4123 - DNA, 21 bp, Artificial Sequence
  Synthetic
actattggagcctgtaagtat

SEQ ID NO: 4124 - DNA, 20 bp, Artificial Sequence
  Synthetic
ctagctcctggactgaccac

SEQ ID NO: 4125 - DNA, 21 bp, Artificial Sequence
  Synthetic
ctagctcctggactgaccact

SEQ ID NO: 4126 - DNA, 20 bp, Artificial Sequence
  Synthetic
gcaaagcagcctgacctagc

SEQ ID NO: 4127 - DNA, 21 bp, Artificial Sequence
  Synthetic
gcaaagcagcctgacctagct

SEQ ID NO: 4128 - DNA, 20 bp, Artificial Sequence
  Synthetic
aaaccgtttacttcaagagc

SEQ ID NO: 4129 - DNA, 21 bp, Artificial Sequence
  Synthetic
aaaccgtttacttcaagagct

SEQ ID NO: 4130 - DNA, 20 bp, Artificial Sequence
  Synthetic
taaaccgtttacttcaagag

SEQ ID NO: 4131 - DNA, 21 bp, Artificial Sequence
  Synthetic
taaaccgtttacttcaagagc

SEQ ID NO: 4132 - DNA, 20 bp, Artificial Sequence
  Synthetic
agatctgagctctgagtgga

SEQ ID NO: 4133 - DNA, 21 bp, Artificial Sequence
  Synthetic
agatctgagctctgagtggaa

SEQ ID NO: 4134 - DNA, 20 bp, Artificial Sequence
  Synthetic
agaagatctgagctctgagt

SEQ ID NO: 4135 - DNA, 21 bp, Artificial Sequence
  Synthetic
agaagatctgagctctgagtg

SEQ ID NO: 4136 - skipped

SEQ ID NO: 4137 - DNA, 21 bp, Artificial Sequence
  Synthetic
agttagaagatctgagctctg

SEQ ID NO: 4138 - DNA, 20 bp, Artificial Sequence
  Synthetic
atgtgtatgcttttctgtta

SEQ ID NO: 4139 - DNA, 21 bp, Artificial Sequence
  Synthetic
atgtgtatgcttttctgttaa

SEQ ID NO: 4140 - DNA, 20 bp, Artificial Sequence
  Synthetic
atcatctcgttgatatcctc

SEQ ID NO: 4141 - DNA, 21 bp, Artificial Sequence
  Synthetic
gatcatctcgttgatatcctc

SEQ ID NO: 4142 - DNA, 20 bp, Artificial Sequence
  Synthetic
gatcaagcagagaaagccag

SEQ ID NO: 4143 - DNA, 21 bp, Artificial Sequence
  Synthetic
tgatcaagcagagaaagccag

SEQ ID NO: 4144 - DNA, 20 bp, Artificial Sequence
  Synthetic
tcggtaagttctgtccaagc

SEQ ID NO: 4145 - DNA, 21 bp, Artificial Sequence
  Synthetic
gtcggtaagttctgtccaagc

SEQ ID NO: 4146 - DNA, 20 bp, Artificial Sequence
  Synthetic
ccggttgaaatctgccagag

SEQ ID NO: 4147 - DNA, 21 bp, Artificial Sequence
  Synthetic
cccggttgaaatctgccagag

SEQ ID NO: 4148 - DNA, 20 bp, Artificial Sequence
  Synthetic
gagcaggtacctccaacatc

SEQ ID NO: 4149 - DNA, 21 bp, Artificial Sequence
  Synthetic
agagcaggtacctccaacatc

SEQ ID NO: 4150 - DNA, 20 bp, Artificial Sequence
  Synthetic
tacctccaacatcaaggaag

SEQ ID NO: 4151 - DNA, 21 bp, Artificial Sequence
  Synthetic
gtacctccaacatcaaggaag

SEQ ID NO: 4152 - DNA, 20 bp, Artificial Sequence
  Synthetic
aggaagatggcatttctagt

SEQ ID NO: 4153 - DNA, 21 bp, Artificial Sequence
  Synthetic
aaggaagatggcatttctagt

SEQ ID NO: 4154 - DNA, 20 bp, Artificial Sequence
  Synthetic
atggcatttctagtttggag

SEQ ID NO: 4155 - DNA, 21 bp, Artificial Sequence
  Synthetic
gatggcatttctagtttggag

SEQ ID NO: 4156 - DNA, 20 bp, Artificial Sequence
  Synthetic
ggcagtttccttagtaacca

SEQ ID NO: 4157 - DNA, 21 bp, Artificial Sequence
  Synthetic
tggcagtttccttagtaacca

SEQ ID NO: 4158 - DNA, 20 bp, Artificial Sequence
  Synthetic
caccagagtaacagtctgag

SEQ ID NO: 4159 - DNA, 21 bp, Artificial Sequence
  Synthetic
tcaccagagtaacagtctgag

SEQ ID NO: 4160 - DNA, 20 bp, Artificial Sequence
  Synthetic
tgagtaggagctaaaatatt

SEQ ID NO: 4161 - DNA, 21 bp, Artificial Sequence
  Synthetic
ctgagtaggagctaaaatatt

SEQ ID NO: 4162 - DNA, 20 bp, Artificial Sequence
  Synthetic
gagtaggagctaaaatattt

SEQ ID NO: 4163 - DNA, 21 bp, Artificial Sequence
  Synthetic
tgagtaggagctaaaatattt

SEQ ID NO: 4164 - DNA, 20 bp, Artificial Sequence
  Synthetic
atattttgggtttttgcaaa

SEQ ID NO: 4165 - DNA, 21 bp, Artificial Sequence
  Synthetic
aatattttgggtttttgcaaa

SEQ ID NO: 4166 - DNA, 20 bp, Artificial Sequence
  Synthetic
gtatgagaaaaaatgataaa

SEQ ID NO: 4167 - DNA, 21 bp, Artificial Sequence
  Synthetic
gtatgagaaaaaatgataaaa

SEQ ID NO: 4168 - DNA, 20 bp, Artificial Sequence
  Synthetic
caacgagatgatcatcaagc

SEQ ID NO: 4169 - DNA, 21 bp, Artificial Sequence
  Synthetic
caacgagatgatcatcaagca

SEQ ID NO: 4170 - DNA, 20 bp, Artificial Sequence
  Synthetic
gagggtgatggtgggtgacc

SEQ ID NO: 4171 - DNA, 21 bp, Artificial Sequence
  Synthetic
gagggtgatggtgggtgacct

SEQ ID NO: 4172 - DNA, 20 bp, Artificial Sequence
  Synthetic
ataaaatcacagagggtgat

SEQ ID NO: 4173 - DNA, 21 bp, Artificial Sequence
  Synthetic
ataaaatcacagagggtgatg

SEQ ID NO: 4174 - DNA, 20 bp, Artificial Sequence
  Synthetic
tataaaatcacagagggtga

SEQ ID NO: 4175 - DNA, 21 bp, Artificial Sequence
  Synthetic
tataaaatcacagagggtgat

SEQ ID NO: 4176 - DNA, 20 bp, Artificial Sequence
  Synthetic
agttataaaatcacagaggg

SEQ ID NO: 4177 - DNA, 21 bp, Artificial Sequence
  Synthetic
agttataaaatcacagagggt

SEQ ID NO: 4178 - DNA, 20 bp, Artificial Sequence
  Synthetic
tgatcaagttataaaatcac

SEQ ID NO: 4179 - DNA, 21 bp, Artificial Sequence
  Synthetic
tgatcaagttataaaatcaca

SEQ ID NO: 4180 - DNA, 20 bp, Artificial Sequence
  Synthetic
ttgatcaagttataaaatca

SEQ ID NO: 4181 - DNA, 21 bp, Artificial Sequence
  Synthetic
ttgatcaagttataaaatcac

SEQ ID NO: 4182 - DNA, 20 bp, Artificial Sequence
  Synthetic
gggcttggacagaacttacc

SEQ ID NO: 4183 - DNA, 21 bp, Artificial Sequence
  Synthetic
gggcttggacagaacttaccg

SEQ ID NO: 4184 - DNA, 20 bp, Artificial Sequence
  Synthetic
ctctggcagatttcaaccgg

SEQ ID NO: 4185 - DNA, 21 bp, Artificial Sequence
  Synthetic
ctctggcagatttcaaccggg

SEQ ID NO: 4186 - DNA, 20 bp, Artificial Sequence
  Synthetic
acctgctctggcagatttca

SEQ ID NO: 4187 - DNA, 21 bp, Artificial Sequence
  Synthetic
acctgctctggcagatttcaa

SEQ ID NO: 4188 - DNA, 20 bp, Artificial Sequence
  Synthetic
tacctgctctggcagatttc

SEQ ID NO: 4189 - DNA, 21 bp, Artificial Sequence
  Synthetic
tacctgctctggcagatttca

SEQ ID NO: 4190 - DNA, 20 bp, Artificial Sequence
  Synthetic
cttgatgttggaggtacctg

SEQ ID NO: 4191 - DNA, 21 bp, Artificial Sequence
  Synthetic
cttgatgttggaggtacctgc

SEQ ID NO: 4192 - DNA, 20 bp, Artificial Sequence
  Synthetic
aatgccatcttccttgatgt

SEQ ID NO: 4193 - DNA, 21 bp, Artificial Sequence
  Synthetic
aatgccatcttccttgatgtt

SEQ ID NO: 4194 - DNA, 20 bp, Artificial Sequence
  Synthetic
agaaatgccatcttccttga

SEQ ID NO: 4195 - DNA, 21 bp, Artificial Sequence
  Synthetic
agaaatgccatcttccttgat

SEQ ID NO: 4196 - DNA, 20 bp, Artificial Sequence
  Synthetic
ggtgacacaacctgtggtta

SEQ ID NO: 4197 - DNA, 21 bp, Artificial Sequence
  Synthetic
ggtgacacaacctgtggttac

SEQ ID NO: 4198 - DNA, 20 bp, Artificial Sequence
  Synthetic
tgttactctggtgacacaac

SEQ ID NO: 4199 - DNA, 21 bp, Artificial Sequence
  Synthetic
tgttactctggtgacacaacc

SEQ ID NO: 4200 - DNA, 20 bp, Artificial Sequence
  Synthetic
agctcctactcagactgtta

SEQ ID NO: 4201 - DNA, 21 bp, Artificial Sequence
  Synthetic
agctcctactcagactgttac

SEQ ID NO: 4202 - DNA, 20 bp, Artificial Sequence
  Synthetic
aggtatctttgatactaacc

SEQ ID NO: 4203 - DNA, 21 bp, Artificial Sequence
  Synthetic
aaggtatctttgatactaacc

SEQ ID NO: 4204 - DNA, 20 bp, Artificial Sequence
  Synthetic
ttggtttctgtgattttctt

SEQ ID NO: 4205 - DNA, 21 bp, Artificial Sequence
  Synthetic
cttggtttctgtgattttctt

SEQ ID NO: 4206 - DNA, 20 bp, Artificial Sequence
  Synthetic
tttggattgcatctactgta

SEQ ID NO: 4207 - DNA, 21 bp, Artificial Sequence
  Synthetic
ttttggattgcatctactgta

SEQ ID NO: 4208 - DNA, 20 bp, Artificial Sequence
  Synthetic
ttggattgcatctactgtat

SEQ ID NO: 4209 - DNA, 21 bp, Artificial Sequence
  Synthetic
tttggattgcatctactgtat

SEQ ID NO: 4210 - DNA, 20 bp, Artificial Sequence
  Synthetic
cctccttccatgactcaagc

SEQ ID NO: 4211 - DNA, 21 bp, Artificial Sequence
  Synthetic
ccctccttccatgactcaagc

SEQ ID NO: 4212 - DNA, 20 bp, Artificial Sequence
  Synthetic
tccatgactcaagcttggct

SEQ ID NO: 4213 - DNA, 21 bp, Artificial Sequence
  Synthetic
ttccatgactcaagcttggct

SEQ ID NO: 4214 - DNA, 20 bp, Artificial Sequence
  Synthetic
atttcattcaactgttgcct

SEQ ID NO: 4215 - DNA, 21 bp, Artificial Sequence
  Synthetic
catttcattcaactgttgcct

SEQ ID NO: 4216 - DNA, 20 bp, Artificial Sequence
  Synthetic
aactgttgcctccggttctg

SEQ ID NO: 4217 - DNA, 21 bp, Artificial Sequence
  Synthetic
caactgttgcctccggttctg

SEQ ID NO: 4218 - DNA, 20 bp, Artificial Sequence
  Synthetic
aattctttcaactagaataa

SEQ ID NO: 4219 - DNA, 21 bp, Artificial Sequence
  Synthetic
gaattctttcaactagaataa

SEQ ID NO: 4220 - DNA, 20 bp, Artificial Sequence
  Synthetic
ccaaaagaaaatcacagaaa

SEQ ID NO: 4221 - DNA, 21 bp, Artificial Sequence
  Synthetic
ccaaaagaaaatcacagaaac

SEQ ID NO: 4222 - DNA, 20 bp, Artificial Sequence
  Synthetic
gccaagcttgagtcatggaa

SEQ ID NO: 4223 - DNA, 21 bp, Artificial Sequence
  Synthetic
gccaagcttgagtcatggaag

SEQ ID NO: 4224 - DNA, 20 bp, Artificial Sequence
  Synthetic
agccaagcttgagtcatgga

SEQ ID NO: 4225 - DNA, 21 bp, Artificial Sequence
  Synthetic
agccaagcttgagtcatggaa

SEQ ID NO: 4226 - DNA, 20 bp, Artificial Sequence
  Synthetic
cagagccaagcttgagtcat

SEQ ID NO: 4227 - DNA, 21 bp, Artificial Sequence
  Synthetic
cagagccaagcttgagtcatg

SEQ ID NO: 4228 - DNA, 20 bp, Artificial Sequence
  Synthetic
aggccagagccaagcttgag

SEQ ID NO: 4229 - DNA, 21 bp, Artificial Sequence
  Synthetic
aggccagagccaagcttgagt

SEQ ID NO: 4230 - DNA, 20 bp, Artificial Sequence
  Synthetic
agaagctgagcaggtcttag

SEQ ID NO: 4231 - DNA, 21 bp, Artificial Sequence
  Synthetic
agaagctgagcaggtcttagg

SEQ ID NO: 4232 - DNA, 20 bp, Artificial Sequence
  Synthetic
aaggaagaagctgagcaggt

SEQ ID NO: 4233 - DNA, 21 bp, Artificial Sequence
  Synthetic
aaggaagaagctgagcaggtc

SEQ ID NO: 4234 - DNA, 20 bp, Artificial Sequence
  Synthetic
ggaagctaaggaagaagctg

SEQ ID NO: 4235 - DNA, 21 bp, Artificial Sequence
  Synthetic
ggaagctaaggaagaagctga

SEQ ID NO: 4236 - DNA, 20 bp, Artificial Sequence
  Synthetic
ttcaacacaatggctggaag

SEQ ID NO: 4237 - DNA, 21 bp, Artificial Sequence
  Synthetic
ttcaacacaatggctggaagc

SEQ ID NO: 4238 - DNA, 20 bp, Artificial Sequence
  Synthetic
gttaaaggattcaacacaat

SEQ ID NO: 4239 - DNA, 21 bp, Artificial Sequence
  Synthetic
gttaaaggattcaacacaatg

SEQ ID NO: 4240 - DNA, 20 bp, Artificial Sequence
  Synthetic
aaatgttaaaggattcaaca

SEQ ID NO: 4241 - DNA, 21 bp, Artificial Sequence
  Synthetic
aaatgttaaaggattcaacac

SEQ ID NO: 4242 - DNA, 20 bp, Artificial Sequence
  Synthetic
gcaacagttgaatgaaatgt

SEQ ID NO: 4243 - DNA, 21 bp, Artificial Sequence
  Synthetic
gcaacagttgaatgaaatgtt

SEQ ID NO: 4244 - DNA, 20 bp, Artificial Sequence
  Synthetic
tacaagaacaccttcagaac

SEQ ID NO: 4245 - DNA, 21 bp, Artificial Sequence
  Synthetic
tacaagaacaccttcagaacc

SEQ ID NO: 4246 - DNA, 20 bp, Artificial Sequence
  Synthetic
aagtacaagaacaccttcag

SEQ ID NO: 4247 - DNA, 21 bp, Artificial Sequence
  Synthetic
aagtacaagaacaccttcaga

SEQ ID NO: 4248 - DNA, 20 bp, Artificial Sequence
  Synthetic
agttgaaagaattcagaatc

SEQ ID NO: 4249 - DNA, 21 bp, Artificial Sequence
  Synthetic
agttgaaagaattcagaatca

SEQ ID NO: 4250 - DNA, 20 bp, Artificial Sequence
  Synthetic
tagttgaaagaattcagaat

SEQ ID NO: 4251 - DNA, 21 bp, Artificial Sequence
  Synthetic
tagttgaaagaattcagaatc

SEQ ID NO: 4252-7020 - skipped (2769 entries)

SEQ ID NO: 7021 - protein, 1057 aa, Artificial Sequence
  Synthetic
MNQKFILGLDIGITSVGYGLIDYETKNIIDAGVRLFPEANVENNEGRRSKRGSRRLKRRRIHRLDRVKHLLAEYDLLDLTNIPKSTNPYQTRVKGLNEKLSKDELVIALLHIAKRRGIHNVDVAADKEETASDSLSTKDQINKNAKFLESRYVCELQKERLENEGHVRGVENRFLTKDIVREAKKIIDTQMQYYPEIDETFKEKYISLVETRREYFEGPGKGSPFGWEGNIKKWFEQMMGHCTYFPEELRSVKYSYSAELFNALNDLNNLVITRDEDAKLNYGEKFQIIENVFKQKKTPNLKQIAIEIGVHETEIKGYRVNKSGTPEFTEFKLYHDLKSIVFDKSILENEAILDQIAEILTIYQDEQSIKEELNKLPEILNEQDKAEIAKLIGYNGTHRLSLKCIHLINEELWQTSRNQMEIFNYLNIKPNKVDLSEQNKIPKDMVNDFILSPVVKRTFIQSINVINKVIEKYGIPEDIIIELARENNSDDRKKFINNLQKKNEATRKRINEIIGQTGNQNAKRIVEKIRLHDQQEGKCLYSLKDIPLEDLLRNPNNYDIDHIIPRSVSFDDSMHNKVLVRREQNAKKNNQTPYQYLTSGYADIKYSVFKQHVLNLAENKDRMTKKKREYLLEERDINKFEVQKEFINRNLVDTRYATRELTNYLKAYFSANNMNVKVKTINGSFTDYLRKVWKFKKERNHGYKHHAEDALIIANADFLFKENKKLKAVNSVLEKPEIETKQLDIQVDSEDNYSEMFIIPKQVQDIKDFRNFKYSHRVDKKPNRQLINDTLYSTRKKDNSTYIVQTIKDIYAKDNTTLKKQFDKSPEKFLMYQHDPRTFEKLEVIMKQYANEKNPLAKYHEETGEYLTKYSKKNNGPIVKSLKYIGNKLGSHLDVTHQFKSSTKKLVKLSIKPYRFDVYLTDKGYKFITISYLDVLKKDNYYYIPEQKYDKLKLGKAIDKNAKFIASFYKNDLIKLDGEIYKIIGVNSDTRNMIELDLPDIRYKEYCELNNIKGEPRIKKTIGKKVNSIEKLTTDVLGNVFTNTQYTKPQLLFKRGN

SEQ ID NO: 7022 - protein, 1053 aa, Artificial Sequence
  Synthetic
MNQKFILGLDIGITSVGYGLIDYETKNIIDAGVRLFPEANVENNEGRRSKRGSRRLKRRRIHRLERVKSLLSEYKIISGLAPTNNQPYNIRVKGLTEQLTKDELAVALLHIAKRRGIHKIDVIDSNDDVGNELSTKEQLNKNSKLLKDKFVCQIQLERMNEGQVRGEKNRFKTADIIKEIIQLLNVQKNFHQLDENFINKYIELVEMRREYFEGPGQGSPFGWNGDLKKWYEMLMGHCTYFPQELRSVKYAYSADLFNALNDLNNLIIQRDNSEKLEYHEKYHIIENVFKQKKKPTLKQIAKEIGVNPEDIKGYRITKSGTPEFTEFKLYHDLKSVLFDQSILENEDVLDQIAEILTIYQDKDSIKSKLTELDILLNEEDKENIAQLTGYNGTHRLSLKCIRLVLEEQWYSSRNQMEIFTHLNIKPKKINLTAANKIPKAMIDEFILSPVVKRTFIQSINVINKVIEKYGIPEDIIIELARENNSDDRKKFINNLQKKNEATRKRINEIIGQTGNQNAKRIVEKIRLHDQQEGKCLYSLESIALMDLLNNPQNYEVDHIIPRSVAFDNSIHNKVLVKQIENSKKGNRTPYQYLNSSDAKLSYNQFKQHILNLSKSKDRISKKKKDYLLEERDINKFEVQKEFINRNLVDTRYATRELTSYLKAYFSANNMDVKVKTINGSFTNHLRKVWRFDKYRNHGYKHHAEDALIIANADFLFKENKKLKAVNSVLEKPEIETKQLDIQVDSEDNYSEMFIIPKQVQDIKDFRNFKYSHRVDKKPNRQLINDTLYSTRKKDNSTYIVQTIKDIYAKDNTTLKKQFDKSPEKFLMYQHDPRTFEKLEVIMKQYANEKNPLAKYHEETGEYLTKYSKKNNGPIVKSLKYIGNKLGSHLDVTHQFKSSTKKLVKLSIKPYRFDVYLTDKGYKFITISYLDVLKKDNYYYIPEQKYDKLKLGKAIDKNAKFIASFYKNDLIKLDGEIYKIIGVNSDTRNMIELDLPDIRYKEYCELNNIKGEPRIKKTIGKKVNSIEKLTTDVLGNVFTNTQYTKPQLLFKRGN

SEQ ID NO: 7023 - protein, 1057 aa, Artificial Sequence
  Synthetic
MNQKFILGLDIGITSVGYGLIDYETKNIIDAGVRLFPEANVENNEGRRSKRGSRRLKRRRIHRLERVKLLLTEYDLINKEQIPTSNNPYQIRVKGLSEILSKDELAIALLHLAKRRGIHNVDVAADKEETASDSLSTKDQINKNAKFLESRYVCELQKERLENEGHVRGVENRFLTKDIVREAKKIIDTQMQYYPEIDETFKEKYISLVETRREYFEGPGQGSPFGWNGDLKKWYEMLMGHCTYFPQELRSVKYAYSADLFNALNDLNNLIIQRDNSEKLEYHEKYHIIENVFKQKKKPTLKQIAKEIGVNPEDIKGYRITKSGTPEFTSFKLFHDLKKVVKDHAILDDIDLLNQIAEILTIYQDKDSIVAELGQLEYLMSEADKQSISELTGYTGTHSLSLKCMNMIIDELWHSSMNQMEVFTYLNMRPKKYELKGYQRIPTDMIDDAILSPVVKRTFIQSINVINKVIEKYGIPEDIIIELARENNSDDRKKFINNLQKKNEATRKRINEIIGQTGNQNAKRIVEKIRLHDQQEGKCLYSLESIPLEDLLNNPNHYEVDHIIPRSVSFDNSYHNKVLVKQSENSKKSNLTPYQYFNSGKSKLSYNQFKQHILNLSKSQDRISKKKKEYLLEERDINKFEVQKEFINRNLVDTRYATRELTNYLKAYFSANNMNVKVKTINGSFTDYLRKVWKFKKERNHGYKHHAEDALIIANADFLFKENKKLKAVNSVLEKPEIETKQLDIQVDSEDNYSEMFIIPKQVQDIKDFRNFKYSHRVDKKPNRQLINDTLYSTRKKDNSTYIVQTIKDIYAKDNTTLKKQFDKSPEKFLMYQHDPRTFEKLEVIMKQYANEKNPLAKYHEETGEYLTKYSKKNNGPIVKSLKYIGNKLGSHLDVTHQFKSSTKKLVKLSIKPYRFDVYLTDKGYKFITISYLDVLKKDNYYYIPEQKYDKLKLGKAIDKNAKFIASFYKNDLIKLDGEIYKIIGVNSDTRNMIELDLPDIRYKEYCELNNIKGEPRIKKTIGKKVNSIEKLTTDVLGNVFTNTQYTKPQLLFKRGN

SEQ ID NO: 7024 - protein, 1057 aa, Artificial Sequence
  Synthetic
MNQKFILGLDIGITSVGYGLIDYETKNIIDAGVRLFPEANVENNEGRRSKRGSRRLKRRRIHRLERVKLLLTEYDLINKEQIPTSNNPYQIRVKGLSEILSKDELAIALLHLAKRRGIHNVDVAADKEETASDSLSTKDQINKNAKFLESRYVCELQKERLENEGHVRGVENRFLTKDIVREAKKIIDTQMQYYPEIDETFKEKYISLVETRREYFEGPGQGSPFGWNGDLKKWYEMLMGHCTYFPQELRSVKYAYSADLFNALNDLNNLIIQRDNSEKLEYHEKYHIIENVFKQKKKPTLKQIAKEIGVNPEDIKGYRITKSGTPEFTSFKLFHDLKKVVKDHAILDDIDLLNQIAEILTIYQDKDSIVAELGQLEYLMSEADKQSISELTGYTGTHSLSLKCMNMIIDELWHSSMNQMEVFTYLNMRPKKYELKGYQRIPTDMIDDAILSPVVKRTFIQSINVINKVIEKYGIPEDIIIELARENNSDDRKKFINNLQKKNEATRKRINEIIGQTGNQNAKRIVEKIRLHDQQEGKCLYSLESIPLEDLLNNPNHYEVDHIIPRSVSFDNSYHNKVLVKQSENSKKSNLTPYQYFNSGKSKLSYNQFKQHILNLSKSQDRISKKKKEYLLEERDINKFEVQKEFINRNLVDTRYATRELTNYLKAYFSANNMNVKVKTINGSFTDYLRKVWKFKKERNHGYKHHAEDALIIANADFLFKENKKLKAVNSVLEKPEIETKQLDIQVDSEDNYSEMFIIPKQVQDIKDFRNFKYSHRVDKKPNRQLINDTLYSTRKKDNSTYIVQTIKDIYAKDNTTLKKQFDKSPEKFLMYQHDPRTFEKLEVIMKQYANEKNPLAKYHEETGEYLTKYSKKNNGPIVKSLKYIGNKLGSHLDVTHQFKSSTKKLVKLSIKNYRFDVYLTEKGYKFVTIAYLNVFKKDNYYYIPKDKYQELKEKKKIKDTDQFIASFYKNDLIKLNGDLYKIIGVNSDDRNIIELDYYDIKYKDYCEINNIKGEPRIKKTIGKKTESIEKFTTDVLGNLYLHSTEKAPQLIFKRGL

SEQ ID NO: 7025 - protein, 1057 aa, Artificial Sequence
  Synthetic
MNQKFILGLDIGITSVGYGLIDYETKNIIDAGVRLFPEANVENNEGRRSKRGSRRLKRRRIHRLERVKLLLTEYDLINKEQIPTSNNPYQIRVKGLSEILSKDELAIALLHLAKRRGIHNVDVAADKEETASDSLSTKDQINKNAKFLESRYVCELQKERLENEGHVRGVENRFLTKDIVREAKKIIDTQMQYYPEIDETFKEKYISLVETRREYFEGPGQGSPFGWNGDLKKWYEMLMGHCTYFPQELRSVKYAYSADLFNALNDLNNLIIQRDNSEKLEYHEKYHIIENVFKQKKKPTLKQIAKEIGVNPEDIKGYRITKSGTPEFTSFKLFHDLKKVVKDHAILDDIDLLNQIAEILTIYQDKDSIVAELGQLEYLMSEADKQSISELTGYTGTHSLSLKCMNMIIDELWHSSMNQMEVFTYLNMRPKKYELKGYQRIPTDMIDDAILSPVVKRTFIQSINVINKVIEKYGIPEDIIIELARENNSDDRKKFINNLQKKNEATRKRINEIIGQTGNQNAKRIVEKIRLHDQQEGKCLYSLESIPLEDLLNNPNHYEVDHIIPRSVSFDNSYHNKVLVKQSENSKKSNLTPYQYFNSGKSKLSYNQFKQHILNLSKSQDRISKKKKEYLLEERDINKFEVQKEFINRNLVDTRYATRELTNYLKAYFSANNMNVKVKTINGSFTDYLRKVWKFKKERNHGYKHHAEDALIIANADFLFKENKKLKAVNSVLEKPEIETKQLDIQVDSEDNYSEMFIIPKQVQDIKDFRNFKFSHRVDKKPNRQLINDTLYSTRMKDEHDYIVQTITDIYGKDNTNLKKQFNKNPEKFLMYQNDPKTFEKLSIIMKQYSDEKNPLAKYYEETGEYLTKYSKKNNGPIVKKIKLLGNKVGNHLDVTNKYENSTKKLVKLSIKNYRFDVYLTEKGYKFVTIAYLNVFKKDNYYYIPKDKYQELKEKKKIKDTDQFIASFYKNDLIKLNGDLYKIIGVNSDDRNIIELDYYDIKYKDYCEINNIKGEPRIKKTIGKKTESIEKFTTDVLGNLYLHSTEKAPQLIFKRGL

SEQ ID NO: 7026 - protein, 1057 aa, Artificial Sequence
  Synthetic
MNQKFILGLDIGITSVGYGLIDYETKNIIDAGVRLFPEANVENNEGRRSKRGSRRLKRRRIHRLERVKLLLTEYDLINKEQIPTSNNPYQIRVKGLSEILSKDELAIALLHLAKRRGIHNVDVAADKEETASDSLSTKDQINKNAKFLESRYVCELQKERLENEGHVRGVENRFLTKDIVREAKKIIDTQMQYYPEIDETFKEKYISLVETRREYFEGPGQGSPFGWNGDLKKWYEMLMGHCTYFPQELRSVKYAYSADLFNALNDLNNLIIQRDNSEKLEYHEKYHIIENVFKQKKKPTLKQIAKEIGVNPEDIKGYRITKSGTPEFTSFKLFHDLKKVVKDHAILDDIDLLNQIAEILTIYQDKDSIVAELGQLEYLMSEADKQSISELTGYTGTHSLSLKCMNMIIDELWHSSMNQMEVFTYLNMRPKKYELKGYQRIPTDMIDDAILSPVVKRTFIQSINVINKVIEKYGIPEDIIIELARENNSDDRKKFINNLQKKNEATRKRINEIIGQTGNQNAKRIVEKIRLHDQQEGKCLYSLESIPLEDLLNNPNHYEVDHIIPRSVSFDNSYHNKVLVKQSENSKKSNLTPYQYFNSGKSKLSYNQFKQHILNLSKSQDRISKKKKEYLLEERDINKFEVQKEFINRNLVDTRYATRELTSYLKAYFSANNMDVKVKTINGSFTNHLRKVWRFDKYRNHGYKHHAEDALIIANADFLFKENKKLQNTNKILEKPTIENNTKKVTVEKEEDYNNVFETPKLVEDIKQYRDYKFSHRVDKKPNRQLINDTLYSTRMKDEHDYIVQTITDIYGKDNTNLKKQFNKNPEKFLMYQNDPKTFEKLSIIMKQYSDEKNPLAKYYEETGEYLTKYSKKNNGPIVKKIKLLGNKVGNHLDVTNKYENSTKKLVKLSIKNYRFDVYLTEKGYKFVTIAYLNVFKKDNYYYIPKDKYQELKEKKKIKDTDQFIASFYKNDLIKLNGDLYKIIGVNSDDRNIIELDYYDIKYKDYCEINNIKGEPRIKKTIGKKTESIEKFTTDVLGNLYLHSTEKAPQLIFKRGL

SEQ ID NO: 7027 - protein, 1054 aa, Artificial Sequence
  Synthetic
MNQKFILGLDIGITSVGYGLIDYETKNIIDAGVRLFPEANVENNEGRRSKRGSRRLKRRRIHRLERVKKLLEDYNLLDQSQIPQSTNPYAIRVKGLSEALSKDELVIALLHIAKRRGIHNINVSSEDEDASNELSTKEQINRNNKLLKDKYVCEVQLQRLKEGQIRGEKNRFKTTDILKEIDQLLKVQKDYHNLDIDFINQYKEIVETRREYFEGPGKGSPYGWEGDPKAWYETLMGHCTYFPDELRSVKYAYSADLFNALNDLNNLVIQRDGLSKLEYHEKYHIIENVFKQKKKPTLKQIANEINVNPEDIKGYRITKSGKPEFTSFKLFHDLKKVVKDHAILDDIDLLNQIAEILTIYQDKDSIVAELGQLEYLMSEADKQSISELTGYTGTHSLSLKCMNMIIDELWHSSMNQMEVFTYLNMRPKKYELKGYQRIPTDMIDDAILSPVVKRTFIQSINVINKVIEKYGIPEDIIIELARENNSDDRKKFINNLQKKNEATRKRINEIIGQTGNQNAKRIVEKIRLHDQQEGKCLYSLESIPLEDLLNNPNHYEVDHIIPRSVSFDNSYHNKVLVKQSENSKKSNLTPYQYFNSGKSKLSYNQFKQHILNLSKSQDRISKKKKEYLLEERDINKFEVQKEFINRNLVDTRYATRELTNYLKAYFSANNMNVKVKTINGSFTDYLRKVWKFKKERNHGYKHHAEDALIIANADFLFKENKKLKAVNSVLEKPEIETKQLDIQVDSEDNYSEMFIIPKQVQDIKDFRNFKYSHRVDKKPNRQLINDTLYSTRKKDNSTYIVQTIKDIYAKDNTTLKKQFDKSPEKFLMYQHDPRTFEKLEVIMKQYANEKNPLAKYHEETGEYLTKYSKKNNGPIVKSLKYIGNKLGSHLDVTHQFKSSTKKLVKLSIKPYRFDVYLTDKGYKFITISYLDVLKKDNYYYIPEQKYDKLKLGKAIDKNAKFIASFYKNDLIKLDGEIYKIIGVNSDTRNMIELDLPDIRYKEYCELNNIKGEPRIKKTIGKKVNSIEKLTTDVLGNVFTNTQYTKPQLLFKRGN

SEQ ID NO: 7028 - protein, 1051 aa, Artificial Sequence
  Synthetic
MNNYILGLDIGITSVGYGIVDSDTREIKDAGVRLFPEANVDNNEGRRSKRGARRLKRRRIHRLDRVKHLLAEYDLLDLTNIPKSTNPYQTRVKGLNEKLSKDELVIALLHIAKRRGIHNVNVMMDDNDSGNELSTKDQLKKNAKALSDKYVCELQLERFEQDYKVRGEKNRFKTEDFVREARKLLETQSKFFEIDQTFIMRYIELIETRREYFEGPGKGSPFGWEGNIKKWFEQMMGHCTYFPEELRSVKYSYSAELFNALNDLNNLVITRDEDAKLNYGEKFQIIENVFKQKKTPNLKQIAIEIGVHETEIKGYRVNKSGKPEFTQFKLYHDLKNIFKDPKYLNDIQLMDNIAEIITIYQDAESIIKELNQLPELLSEREKEKISALSGYSGTHRLSLKCINLLLDDLWESSLNQMELFTKLNLKPKKIDLSQQHKIPSKLVDDFILSPVVKRAFIQSIQVVNAIIDKYGLPEDIIIELARENNSDDRRKFLNQLQKQNEETRKQVEKVLREYGNDNAKRIVQKIKLHNMQEGKCLYSLKDIPLEDLLRNPHHYEVDHIIPRSVAFDNSMHNKVLVRADENSKKGNRTPYQYLNSSESSLSYNEFKQHILNLSKTKDRITKKKREYLLEERDINKFDVQKEFINRNLVDTRYATRELTSLLKAYFSANNLDVKVKTINGSFTNYLRKVWKFDKDRNKGYKHHAEDALIIANADFLFKHNKKLRNINKVLDAPSKEVDKKRVTVQSEDEYNQIFEDTQKAQAIKKFEIRKFSHRVDKKPNRQLINDTLYSTRNIDGIEYVVESIKDIYSVNNDKVKTKFKKDPHRLLMYRNDPQTFEKFEKVFKQYESEKNPFAKYYEETGEKIRKFSKTGQGPYINKIKYLRERLGRHCDVTNKYINSRNKIVQLKIYSYRFDIYQYGNNYKMITISYIDLEQKSNYYYISREKYEQKKKDKQIDDSYKFIGSFYKNDIINYNGEMYRVIGVNDSEKNKIQLDMIDISIKDYMELNNIKKTGVIYKTIGKSTTHIEKYTTDILGNLYKAAPPKKPQLIFK

SEQ ID NO: 7029 - protein, 1052 aa, Artificial Sequence
  Synthetic
MEKDYILGLDIGIGSVGYGLIDYDTKSIIDAGVRLFPEANADNNLGRRAKRGARRLKRRRIHRLERVKSLLSEYKIISGLAPTNNQPYNIRVKGLTEQLTKDELAVALLHIAKRRGIHNVDVAADKEETASDSLSTKDQINKNAKFLESRYVCELQKERLENEGHVRGVENRFLTKDIVREAKKIIDTQMQYYPEIDETFKEKYISLVETRREYYEGPGKGSPYGWDADVKKWYQLMMGHCTYFPVEFRSVKYAYTADLYNALNDLNNLTIARDDNPKLEYHEKYHIIENVFKQKRNPTLKQIAKEIGVNDINISGYRVTKSGKPQFTSFKLFHDLKKVVKDHAILDDIDLLNQIAEILTIYQDKDSIVAELGQLEYLMSEADKQSISELTGYTGTHSLSLKCMNMIIDELWHSSMNQMEVFTYLNMRPKKYELKGYQRIPTDMIDDAILSPVVKRSFKQAIGVVNAIIKKYGLPKDIIIELARESNSAEKSRYLRAIQKKNEKTRERIEAIIKEYGNENAKGLVQKIKLHDAQEGKCLYSLKDIPLEDLLRNPNNYDIDHIIPRSVSFDDSMHNKVLVRREQNAKKNNQTPYQYLTSGYADIKYSVFKQHVLNLAENKDRMTKKKREYLLEERNINKYDVQKEFINRNLVDTRYTTRELTTLLKTYFTINNLDVKVKTINGSFTDFLRKRWGFKKNRDEGYKHHAEDALIIANADYLFKEHKLLKEIKDVSDLAGDERNSNVKDEDQYEEVFGGYFKIEDIKKYKIKKFSHRVDKKPNRQLINDTIYSTRVKDDKRYLINTLKNLYDKSNGDLKERMQKDPESLLMYHHDPQTFEKLKIVMSQYENEKNPLAKYFEETGQYLTKYAKHDNGPAIHKIKYYGNKLVEHLDITKNYHNPQNKVVQLSQKSFRFDVYQTDKGYKFISIAYLTLKNEKNYYAISQEKYDQLKSEKKISNNAVFIGSFYTSDIIEINNEKFRVIGVNSDKNNLIEVDRIDIRQKEFIELEEEKKNNRIKVTIGRKTTNIEKFHTDILGNMYKSKRPKAPQLVFKKG

SEQ ID NO: 7030 - protein, 1054 aa, Artificial Sequence
  Synthetic
MKEKYILGLDLGITSVGYGIINFETKKIIDAGVRLFPEANVDNNEGRRSKRGSRRLKRRRIHRLERVKLLLTEYDLINKEQIPTSNNPYQIRVKGLSEILSKDELAIALLHLAKRRGIHNINVSSEDEDASNELSTKEQINRNNKLLKDKYVCEVQLQRLKEGQIRGEKNRFKTTDILKEIDQLLKVQKDYHNLDIDFINQYKEIVETRREYFEGPGQGSPFGWNGDLKKWYEMLMGHCTYFPQELRSVKYAYSADLFNALNDLNNLIIQRDNSEKLEYHEKYHIIENVFKQKKKPTLKQIAKEIGVNPEDIKGYRITKSGTPQFTEFKLYHDLKSIVFDKSILENEAILDQIAEILTIYQDEQSIKEELNKLPEILNEQDKAEIAKLIGYNGTHRLSLKCIHLINEELWQTSRNQMEIFNYLNIKPNKVDLSEQNKIPKDMVNDFILSPVVKRTFIQSINVINKVIEKYGIPEDIIIELARENNSDDRKKFINNLQKKNEATRKRINEIIGQTGNQNAKRIVEKIRLHDQQEGKCLYSLESIALMDLLNNPQNYEVDHIIPRSVAFDNSIHNKVLVKQIENSKKGNRTPYQYLNSSDAKLSYNQFKQHILNLSKSKDRISKKKKDYLLEERDINKFEVQKEFINRNLVDTRYATRELTSYLKAYFSANNMDVKVKTINGSFTNHLRKVWRFDKYRNHGYKHHAEDALIIANADFLFKENKKLQNTNKILEKPTIENNTKKVTVEKEEDYNNVFETPKLVEDIKQYRDYKFSHRVDKKPNRQLINDTLYSTRMKDEHDYIVQTITDIYGKDNTNLKKQFNKNPEKFLMYQNDPKTFEKLSIIMKQYSDEKNPLAKYYEETGEYLTKYSKKNNGPIVKKIKLLGNKVGNHLDVTNKYENSTKKLVKLSIKNYRFDVYLTEKGYKFVTIAYLNVFKKDNYYYIPKDKYQELKEKKKIKDTDQFIASFYKNDLIKLNGDLYKIIGVNSDDRNIIELDYYDIKYKDYCEINNIKGEPRIKKTIGKKTESIEKFTTDVLGNLYLHSTEKAPQLIFKRGL

SEQ ID NO: 7031 - protein, 1093 aa, Artificial Sequence
  Synthetic
MSNKEKNASETRKAYTTKMIPRSHDRMKLLGNFMDYLMDGTPIFFELWNQFGGGIDRDIISGTANKDKISDDLLLAVNWFKVMPINSKPQGVSPSNLANLFQQYSGSEPDIQAQEYFASNFDTEKHQWKDMRVEYERLLAELQLSRSDMHHDLKLMYKEKCIGLSLSTAHYITSVMFGTGAKNNRQTKHQFYSKVIQLLEESTQINSVEQLASIILKAGDCDSYRKLRIRCSRKGATPSILKIVQDYELGTNHDDEVNVPSLIANLKEKLGRFEYECEWKCMEKIKAFLASKVGPYYLGSYSAMLENALSPIKGMTTKNCKFVLKQIDAKNDIKYENEPFGKIVEGFFDSPYFESDTNVKWVLHPHHIGESNIKTLWEDLNAIHSKYEEDIASLSEDKKEKRIKVYQGDVCQTINTYCEEVGKEAKTPLVQLLRYLYSRKDDIAVDKIIDGITFLSKKHKVEKQKINPVIQKYPSFNFGNNSKLLGKIISPKDKLKHNLKCNRNQVDNYIWIEIKVLNTKTMRWEKHHYALSSTRFLEEVYYPATSENPPDALAARFRTKTNGYEGKPALSAEQIEQIRSAPVGLRKVKKRQMRLEAARQQNLLPRYTWGKDFNINICKRGNNFEVTLATKVKKKKEKNYKVVLGYDANIVRKNTYAAIEAHANGDGVIDYNDLPVKPIESGFVTVESQVRDKSYDQLSYNGVKLLYCKPHVESRRSFLEKYRNGTMKDNRGNNIQIDFMKDFEAIADDETSLYYFNMKYCKLLQSSIRNHSSQAKEYREEIFELLRDGKLSVLKLSSLSNLSFVMFKVAKSLIGTYFGHLLKKPKNSKSDVKAPPITDEDKQKADPEMFALRLALEEKRLNKVKSKKEVIANKIVAKALELRDKYGPVLIKGENISDTTKKGKKSSTNSFLMDWLARGVANKVKEMVMMHQGLEFVEVNPNFTSHQDPFVHKNPENTFRARYSRCTPSELTEKNRKEILSFLSDKPSKRPTNAYYNEGAMAFLATYGLKKNDVLGVSLEKFKQIMANILHQRSEDQLLFPSRGGMFYLATYKLDADATSVNWNGKQFWVCNADLVAAYNVGLVDIQKDFKKK

SEQ ID NO: 7032 - protein, 1054 aa, Artificial Sequence
  Synthetic
MSSAIKSYKSVLRPNERKNQLLKSTIQCLEDGSAFFFKMLQGLFGGITPEIVRFSTEQEKQQQDIALWCAVNWFRPVSQDSLTHTIASDNLVEKFEEYYGGTASDAIKQYFSASIGESYYWNDCRQQYYDLCRELGVEVSDLTHDLEILCREKCLAVATESNQNNSIISVLFGTGEKEDRSVKLRITKKILEAISNLKEIPKNVAPIQEIILNVAKATKETFRQVYAGNLGAPSTLEKFIAKDGQKEFDLKKLQTDLKKVIRGKSKERDWCCQEELRSYVEQNTIQYDLWAWGEMFNKAHTALKIKSTRNYNFAKQRLEQFKEIQSLNNLLVVKKLNDFFDSEFFSGEETYTICVHHLGGKDLSKLYKAWEDDPADPENAIVVLCDDLKNNFKKEPIRNILRYIFTIRQECSAQDILAAAKYNQQLDRYKSQKANPSVLGNQGFTWTNAVILPEKAQRNDRPNSLDLRIWLYLKLRHPDGRWKKHHIPFYDTRFFQEIYAAGNSPVDTCQFRTPRFGYHLPKLTDQTAIRVNKKHVKAAKTEARIRLAIQQGTLPVSNLKITEISATINSKGQVRIPVKFDVGRQKGTLQIGDRFCGYDQNQTASHAYSLWEVVKEGQYHKELGCFVRFISSGDIVSITENRGNQFDQLSYEGLAYPQYADWRKKASKFVSLWQITKKNKKKEIVTVEAKEKFDAICKYQPRLYKFNKEYAYLLRDIVRGKSLVELQQIRQEIFRFIEQDCGVTRLGSLSLSTLETVKAVKGIIYSYFSTALNASKNNPISDEQRKEFDPELFALLEKLELIRTRKKKQKVERIANSLIQTCLENNIKFIRGEGDLSTTNNATKKKANSRSMDWLARGVFNKIRQLAPMHNITLFGCGSLYTSHQDPLVHRNPDKAMKCRWAAIPVKDIGDWVLRKLSQNLRAKNIGTGEYYHQGVKEFLSHYELQDLEEELLKWRSDRKSNIPCWVLQNRLAEKLGNKEAVVYIPVRGGRIYFATHKVATGAVSIVFDQKQVWVCNADHVAAANIALTVKGIGEQSSDEENPDGSRIKLQLTS

SEQ ID NO: 7033 - protein, 1368 aa, Artificial Sequence [sequence omitted]

SEQ ID NO: 7034-9000 - skipped (1967 entries)

SEQ ID NO: 9001 - DNA, 219 bp, Artificial Sequence
  Synthetic
gagggcctatttcccatgattccttcatatttgcatatacgatacaaggctgttagagagataattggaattaatttgactgtaaacacaaagatataatttcttgggtagtttgcagttttaaaattatgttttaaaatggactatcatatgcttaccgtaacttgaaagtatttcgatttcttggctttatatatcttgtggaaaggacgaaacacc

SEQ ID NO: 9002 - DNA, 189 bp, Artificial Sequence
  Synthetic
gagggcctatttcccatgattccttcatatttgcatatacgatacaaggctgttagagagataattggaattaatttgacgtttgcagttttaaaattatgttttaaaatggactatcatatgcttaccgtaacttgaaagtatttcgatttcttggctttatatatcttgtggaaaggacgaaacacc

SEQ ID NO: 9003 - DNA, 159 bp, Artificial Sequence
  Synthetic
gagggcctatttcccatgattccttcatatttgcatatacgatacaaggctgttagagagataatattatgttttaaaatggactatcatatgcttaccgtaacttgaaagtatttcgatttcttggctttatatatcttgtggaaaggacgaaacacc

SEQ ID NO: 9004 - DNA, 129 bp, Artificial Sequence
  Synthetic
gagggcctatttcccatgattccttcatatttgcatatacgatacaaggcggactatcatatgcttaccgtaacttgaaagtatttcgatttcttggctttatatatcttgtggaaaggacgaaacacc

SEQ ID NO: 9005 - skipped

SEQ ID NO: 9006 - DNA, 213 bp, Artificial Sequence
  Synthetic
ctgcagtatttagcatgccccacccatctgcaaggcattctggatagtgtcaaaacagccggaaatcaagtccgtttatctcaaactttagcatttaaattagattttagttaaatttcctgctgaagctctagtacgataagcaacttgacctaagtgtaaagttgagacttccttcaggtttatatagcttgtgcgccgcttgggtacctc

SEQ ID NO: 9007 - DNA, 183 bp, Artificial Sequence
  Synthetic
ctgcagtatttagcatgccccacccatctgcaaggcattctggatagtgtcaaaacagccggaaatcaagtccgtttatcttaaatttcctgctgaagctctagtacgataagcaacttgacctaagtgtaaagttgagacttccttcaggtttatatagcttgtgcgccgcttgggtacctc

SEQ ID NO: 9008 - DNA, 153 bp, Artificial Sequence
  Synthetic
ctgcagtatttagcatgccccacccatctgcaaggcattctggatagtgtcaaaacagccggaaatagctctagtacgataagcaacttgacctaagtgtaaagttgagacttccttcaggtttatatagcttgtgcgccgcttgggtacctc

SEQ ID NO: 9009 - DNA, 123 bp, Artificial Sequence
  Synthetic
ctgcagtatttagcatgccccacccatctgcaaggcattctggatagtgtcagcaacttgacctaagtgtaaagttgagacttccttcaggtttatatagcttgtgcgccgcttgggtacctc

SEQ ID NO: 9010-9013 - skipped (4 entries)

SEQ ID NO: 9014 - DNA, 3156 bp, Artificial Sequence
  Synthetic
aagcgcaattacatcctgggcctggatatcggcatcacctccgtgggctacggcatcatcgactatgagacacgggatgtgatcgacgccggcgtgagactgttcaaggaggccaacgtggagaacaatgagggccggcggagcaagaggggagcaaggcgcctgaagcggagaaggcgccacagaatccagagagtgaagaagctgctgttcgattacaacctgctgaccgaccactccgagctgtctggcatcaatccttatgaggcccgggtgaagggcctgtcccagaagctgtctgaggaggagttttctgccgccctgctgcacctggcaaagaggagaggcgtgcacaacgtgaatgaggtggaggaggacaccggcaacgagctgagcacaaaggagcagatcagccgcaattccaaggccctggaggagaagtatgtggccgagctgcagctggagcggctgaagaaggatggcgaggtgaggggctccatcaatcgcttcaagacctctgactacgtgaaggaggccaagcagctgctgaaggtgcagaaggcctaccaccagctggatcagagctttatcgatacatatatcgacctgctggagaccaggcgcacatactatgagggaccaggagagggctcccccttcggctggaaggacatcaaggagtggtacgagatgctgatgggccactgcacctattttccagaggagctgagatccgtgaagtacgcctataacgccgatctgtacaacgccctgaatgacctgaacaacctggtcatcaccagggatgagaacgagaagctggagtactatgagaagttccagatcatcgagaacgtgttcaagcagaagaagaagcctacactgaagcagatcgccaaggagatcctggtgaacgaggaggacatcaagggctaccgcgtgaccagcacaggcaagccagagttcaccaatctgaaggtgtatcacgatatcaaggacatcacagcccggaaggagatcatcgagaacgccgagctgctggatcagatcgccaagatcctgaccatctatcagagctccgaggacatccaggaggagctgaccaacctgaatagcgagctgacacaggaggagatcgagcagatcagcaatctgaagggctacaccggcacacacaacctgtccctgaaggccatcaatctgatcctggatgagctgtggcacacaaacgacaatcagatcgccatctttaacaggctgaagctggtgccaaagaaggtggacctgagccagcagaaggagatcccaaccacactggtggacgatttcatcctgtcccccgtggtgaagcggagcttcatccagagcatcaaagtgatcaacgccatcatcaagaagtacggcctgcccaatgatatcatcatcgagctggccagggagaagaactctaaggacgcccagaagatgatcaatgagatgcagaagaggaaccgccagaccaatgagcggatcgaggagatcatcagaaccacaggcaaggagaacgccaagtacctgatcgagaagatcaagctgcacgatatgcaggagggcaagtgtctgtatagcctggaggccatccctctggaggacctgctgaacaatccattcaactacgaggtggatcacatcatcccccggagcgtgagcttcgacaattcctttaacaataaggtgctggtgaagcaggaggagaactctaagaagggcaataggacccctttccagtacctgtctagctccgattctaagatcagctacgagaccttcaagaagcacatcctgaatctggccaagggcaagggccgcatctctaagaccaagaaggagtacctgctggaggagcgggacatcaacagattcagcgtgcagaaggacttcatcaaccggaatctggtggacaccagatacgccacacgcggcctgatgaatctgctgcggtcctatttcagagtgaacaatctggatgtgaaggtgaagagcatcaacggcggcttcacctcctttctgcggagaaagtggaagtttaagaaggagagaaacaagggctataagcaccacgccgaggatgccctgatcatcgccaatgccgacttcatctttaaggagtggaagaagctggacaaggccaagaaagtgatggagaaccagatgttcgaggagaagcaggccgagagcatgcccgagatcgagaccgagcaggagtacaaggagattttcatcacacctcaccagatcaagcacatcaaggacttcaaggactacaagtattcccacagggtggataagaagcccaaccgcgagctgatcaatgacaccctgtattctacaaggaaggacgataagggcaataccctgatcgtgaacaatctgaacggcctgtacgacaaggataatgacaagctgaagaagctgatcaacaagagccccgagaagctgctgatgtaccaccacgatcctcagacatatcagaagctgaagctgatcatggagcagtacggcgacgagaagaacccactgtataagtactatgaggagaccggcaactacctgacaaagtattccaagaaggataatggccccgtgatcaagaagatcaagtactatggcaacaagctgaatgcccacctggacatcaccgacgattaccccaacagccggaataaggtggtgaagctgagcctgaagccatacaggttcgacgtgtacctggacaacggcgtgtataagtttgtgacagtgaagaatctggatgtgatcaagaaggagaactactatgaagtgaatagcaagtgctacgaggaggccaagaagctgaagaagatcagcaaccaggccgagttcatcgcctctttttacaacaatgacctgatcaagatcaatggcgagctgtatagagtgatcggcgtgaacaatgatctgctgaaccgcatcgaagtgaatatgatcgacatcacctaccgggagtatctggagaacatgaatgataagaggccccctcgcatcatcaagaccatcgcctctaagacacagagcatcaagaagtactctacagacatcctgggcaacctgtatgaggtgaagagcaagaagcaccctcagatcatcaagaagggc
